United States Patent Application Publication US 2024/0392294 A1 - sequence listing, part 2

SEQ ID NO: 3203 - RNA, 21 nt, synthetic construct
  source 1..21: mol_type = other RNA
  modified_base 1: mod_base = OTHER; note = 2'-O-methylcytidine-3'-phosphorothioate
  modified_base 2: mod_base = OTHER; note = 2'-O-methylcytidine-3'-phosphorothioate
  modified_base 3: mod_base = OTHER; note = 2'-O-methyladenosine-3'-phosphate
  modified_base 4: mod_base = OTHER; note = 2'-O-methylguanosine-3'-phosphate
  modified_base 5: mod_base = OTHER; note = 2'-O-methylcytidine-3'-phosphate
  modified_base 6: mod_base = OTHER; note = 2'-O-methyladenosine-3'-phosphate
  modified_base 7: mod_base = OTHER; note = 2'-fluoroadenosine-3'-phosphate
  modified_base 8: mod_base = OTHER; note = 2'-O-methyladenosine-3'-phosphate
  modified_base 9: mod_base = OTHER; note = 2'-fluoroadenosine-3'-phosphate
  modified_base 10: mod_base = OTHER; note = 2'-fluorocytidine-3'-phosphate
  modified_base 11: mod_base = OTHER; note = 2'-fluorouridine-3'-phosphate
  modified_base 12: mod_base = OTHER; note = 2'-O-methylcytidine-3'-phosphate
  modified_base 13: mod_base = OTHER; note = 2'-O-methylcytidine-3'-phosphate
  modified_base 14: mod_base = OTHER; note = 2'-O-methylcytidine-3'-phosphate
  modified_base 15: mod_base = OTHER; note = 2'-O-methyluridine-3'-phosphate
  modified_base 16: mod_base = OTHER; note = 2'-O-methylcytidine-3'-phosphate
  modified_base 17: mod_base = OTHER; note = 2'-O-methyladenosine-3'-phosphate
  modified_base 18: mod_base = OTHER; note = 2'-O-methyladenosine-3'-phosphate
  modified_base 19: mod_base = OTHER; note = 2'-O-methylcytidine-3'-phosphate
  modified_base 20: mod_base = OTHER; note = 2'-O-methyluridine-3'-phosphate
  modified_base 21: mod_base = OTHER; note = 2'-O-methyluridine-3'-phosphate N-[tris(GalNAc-alkyl)-amidodecanoyl)]-4-hydroxyprolinol (Hyp-(GalNAc-alkyl)3)
ccagcaaaactccctcaactt

SEQ ID NO: 3204 - RNA, 21 nt, synthetic construct
  source 1..21: mol_type = other RNA
  modified_base 1: mod_base = OTHER; note = 2'-O-methylguanosine-3'-phosphorothioate
  modified_base 2: mod_base = OTHER; note = 2'-O-methylcytidine-3'-phosphorothioate
  modified_base 3: mod_base = OTHER; note = 2'-O-methyladenosine-3'-phosphate
  modified_base 4: mod_base = OTHER; note = 2'-O-methyladenosine-3'-phosphate
  modified_base 5: mod_base = OTHER; note = 2'-O-methyladenosine-3'-phosphate
  modified_base 6: mod_base = OTHER; note = 2'-O-methyladenosine-3'-phosphate
  modified_base 7: mod_base = OTHER; note = 2'-fluorocytidine-3'-phosphate
  modified_base 8: mod_base = OTHER; note = 2'-O-methyluridine-3'-phosphate
  modified_base 9: mod_base = OTHER; note = 2'-fluorocytidine-3'-phosphate
  modified_base 10: mod_base = OTHER; note = 2'-fluorocytidine-3'-phosphate
  modified_base 11: mod_base = OTHER; note = 2'-fluorocytidine-3'-phosphate
  modified_base 12: mod_base = OTHER; note = 2'-O-methyluridine-3'-phosphate
  modified_base 13: mod_base = OTHER; note = 2'-O-methylcytidine-3'-phosphate
  modified_base 14: mod_base = OTHER; note = 2'-O-methyladenosine-3'-phosphate
  modified_base 15: mod_base = OTHER; note = 2'-O-methyladenosine-3'-phosphate
  modified_base 16: mod_base = OTHER; note = 2'-O-methylcytidine-3'-phosphate
  modified_base 17: mod_base = OTHER; note = 2'-O-methyluridine-3'-phosphate
  modified_base 18: mod_base = OTHER; note = 2'-O-methylguanosine-3'-phosphate
  modified_base 19: mod_base = OTHER; note = 2'-O-methylguanosine-3'-phosphate
  modified_base 20: mod_base = OTHER; note = 2'-O-methyladenosine-3'-phosphate
  modified_base 21: mod_base = OTHER; note = 2'-O-methyluridine-3'-phosphate N-[tris(GalNAc-alkyl)-amidodecanoyl)]-4-hydroxyprolinol (Hyp-(GalNAc-alkyl)3)
gcaaaactccctcaactggat

SEQ ID NO: 3205 - RNA, 21 nt, synthetic construct
  source 1..21: mol_type = other RNA
  modified_base 1: mod_base = OTHER; note = 2'-O-methylcytidine-3'-phosphorothioate
  modified_base 2: mod_base = OTHER; note = 2'-O-methyladenosine-3'-phosphorothioate
  modified_base 3: mod_base = OTHER; note = 2'-O-methyladenosine-3'-phosphate
  modified_base 4: mod_base = OTHER; note = 2'-O-methyladenosine-3'-phosphate
  modified_base 5: mod_base = OTHER; note = 2'-O-methyladenosine-3'-phosphate
  modified_base 6: mod_base = OTHER; note = 2'-O-methylcytidine-3'-phosphate
  modified_base 7: mod_base = OTHER; note = 2'-fluorouridine-3'-phosphate
  modified_base 8: mod_base = OTHER; note = 2'-O-methylcytidine-3'-phosphate
  modified_base 9: mod_base = OTHER; note = 2'-fluorocytidine-3'-phosphate
  modified_base 10: mod_base = OTHER; note = 2'-fluorocytidine-3'-phosphate
  modified_base 11: mod_base = OTHER; note = 2'-fluorouridine-3'-phosphate
  modified_base 12: mod_base = OTHER; note = 2'-O-methylcytidine-3'-phosphate
  modified_base 13: mod_base = OTHER; note = 2'-O-methyladenosine-3'-phosphate
  modified_base 14: mod_base = OTHER; note = 2'-O-methyladenosine-3'-phosphate
  modified_base 15: mod_base = OTHER; note = 2'-O-methylcytidine-3'-phosphate
  modified_base 16: mod_base = OTHER; note = 2'-O-methyluridine-3'-phosphate
  modified_base 17: mod_base = OTHER; note = 2'-O-methylguanosine-3'-phosphate
  modified_base 18: mod_base = OTHER; note = 2'-O-methylguanosine-3'-phosphate
  modified_base 19: mod_base = OTHER; note = 2'-O-methyladenosine-3'-phosphate
  modified_base 20: mod_base = OTHER; note = 2'-O-methyluridine-3'-phosphate
  modified_base 21: mod_base = OTHER; note = 2'-O-methyluridine-3'-phosphate N-[tris(GalNAc-alkyl)-amidodecanoyl)]-4-hydroxyprolinol (Hyp-(GalNAc-alkyl)3)
caaaactccctcaactggatt

SEQ ID NO: 3206 - RNA, 21 nt, synthetic construct
  source 1..21: mol_type = other RNA
  modified_base 1: mod_base = OTHER; note = 2'-O-methyladenosine-3'-phosphorothioate
  modified_base 2: mod_base = OTHER; note = 2'-O-methyladenosine-3'-phosphorothioate
  modified_base 3: mod_base = OTHER; note = 2'-O-methyladenosine-3'-phosphate
  modified_base 4: mod_base = OTHER; note = 2'-O-methylcytidine-3'-phosphate
  modified_base 5: mod_base = OTHER; note = 2'-O-methyluridine-3'-phosphate
  modified_base 6: mod_base = OTHER; note = 2'-O-methylcytidine-3'-phosphate
  modified_base 7: mod_base = OTHER; note = 2'-fluorocytidine-3'-phosphate
  modified_base 8: mod_base = OTHER; note = 2'-O-methylcytidine-3'-phosphate
  modified_base 9: mod_base = OTHER; note = 2'-fluorouridine-3'-phosphate
  modified_base 10: mod_base = OTHER; note = 2'-fluorocytidine-3'-phosphate
  modified_base 11: mod_base = OTHER; note = 2'-fluoroadenosine-3'-phosphate
  modified_base 12: mod_base = OTHER; note = 2'-O-methyladenosine-3'-phosphate
  modified_base 13: mod_base = OTHER; note = 2'-O-methylcytidine-3'-phosphate
  modified_base 14: mod_base = OTHER; note = 2'-O-methyluridine-3'-phosphate
  modified_base 15: mod_base = OTHER; note = 2'-O-methylguanosine-3'-phosphate
  modified_base 16: mod_base = OTHER; note = 2'-O-methylguanosine-3'-phosphate
  modified_base 17: mod_base = OTHER; note = 2'-O-methyladenosine-3'-phosphate
  modified_base 18: mod_base = OTHER; note = 2'-O-methyluridine-3'-phosphate
  modified_base 19: mod_base = OTHER; note = 2'-O-methylguanosine-3'-phosphate
  modified_base 20: mod_base = OTHER; note = 2'-O-methyladenosine-3'-phosphate
  modified_base 21: mod_base = OTHER; note = 2'-O-methyluridine-3'-phosphate N-[tris(GalNAc-alkyl)-amidodecanoyl)]-4-hydroxyprolinol (Hyp-(GalNAc-alkyl)3)
aaactccctcaactggatgat

SEQ ID NO: 3207 - RNA, 21 nt, synthetic construct
  source 1..21: mol_type = other RNA
  modified_base 1: mod_base = OTHER; note = 2'-O-methyladenosine-3'-phosphorothioate
  modified_base 2: mod_base = OTHER; note = 2'-O-methyladenosine-3'-phosphorothioate
  modified_base 3: mod_base = OTHER; note = 2'-O-methylcytidine-3'-phosphate
  modified_base 4: mod_base = OTHER; note = 2'-O-methyluridine-3'-phosphate
  modified_base 5: mod_base = OTHER; note = 2'-O-methylcytidine-3'-phosphate
  modified_base 6: mod_base = OTHER; note = 2'-O-methylcytidine-3'-phosphate
  modified_base 7: mod_base = OTHER; note = 2'-fluorocytidine-3'-phosphate
  modified_base 8: mod_base = OTHER; note = 2'-O-methyluridine-3'-phosphate
  modified_base 9: mod_base = OTHER; note = 2'-fluorocytidine-3'-phosphate
  modified_base 10: mod_base = OTHER; note = 2'-fluoroadenosine-3'-phosphate
  modified_base 11: mod_base = OTHER; note = 2'-fluoroadenosine-3'-phosphate
  modified_base 12: mod_base = OTHER; note = 2'-O-methylcytidine-3'-phosphate
  modified_base 13: mod_base = OTHER; note = 2'-O-methyluridine-3'-phosphate
  modified_base 14: mod_base = OTHER; note = 2'-O-methylguanosine-3'-phosphate
  modified_base 15: mod_base = OTHER; note = 2'-O-methylguanosine-3'-phosphate
  modified_base 16: mod_base = OTHER; note = 2'-O-methyladenosine-3'-phosphate
  modified_base 17: mod_base = OTHER; note = 2'-O-methyluridine-3'-phosphate
  modified_base 18: mod_base = OTHER; note = 2'-O-methylguanosine-3'-phosphate
  modified_base 19: mod_base = OTHER; note = 2'-O-methyladenosine-3'-phosphate
  modified_base 20: mod_base = OTHER; note = 2'-O-methyladenosine-3'-phosphate
  modified_base 21: mod_base = OTHER; note = 2'-O-methyluridine-3'-phosphate N-[tris(GalNAc-alkyl)-amidodecanoyl)]-4-hydroxyprolinol (Hyp-(GalNAc-alkyl)3)
aactccctcaactggatgaat

SEQ ID NO: 3208 - RNA, 21 nt, synthetic construct
  source 1..21: mol_type = other RNA
  modified_base 1: mod_base = OTHER; note = 2'-O-methylcytidine-3'-phosphorothioate
  modified_base 2: mod_base = OTHER; note = 2'-O-methyluridine-3'-phosphorothioate
  modified_base 3: mod_base = OTHER; note = 2'-O-methylcytidine-3'-phosphate
  modified_base 4: mod_base = OTHER; note = 2'-O-methylcytidine-3'-phosphate
  modified_base 5: mod_base = OTHER; note = 2'-O-methylcytidine-3'-phosphate
  modified_base 6: mod_base = OTHER; note = 2'-O-methyluridine-3'-phosphate
  modified_base 7: mod_base = OTHER; note = 2'-fluorocytidine-3'-phosphate
  modified_base 8: mod_base = OTHER; note = 2'-O-methyladenosine-3'-phosphate
  modified_base 9: mod_base = OTHER; note = 2'-fluoroadenosine-3'-phosphate
  modified_base 10: mod_base = OTHER; note = 2'-fluorocytidine-3'-phosphate
  modified_base 11: mod_base = OTHER; note = 2'-fluorouridine-3'-phosphate
  modified_base 12: mod_base = OTHER; note = 2'-O-methylguanosine-3'-phosphate
  modified_base 13: mod_base = OTHER; note = 2'-O-methylguanosine-3'-phosphate
  modified_base 14: mod_base = OTHER; note = 2'-O-methyladenosine-3'-phosphate
  modified_base 15: mod_base = OTHER; note = 2'-O-methyluridine-3'-phosphate
  modified_base 16: mod_base = OTHER; note = 2'-O-methylguanosine-3'-phosphate
  modified_base 17: mod_base = OTHER; note = 2'-O-methyladenosine-3'-phosphate
  modified_base 18: mod_base = OTHER; note = 2'-O-methyladenosine-3'-phosphate
  modified_base 19: mod_base = OTHER; note = 2'-O-methylguanosine-3'-phosphate
  modified_base 20: mod_base = OTHER; note = 2'-O-methyladenosine-3'-phosphate
  modified_base 21: mod_base = OTHER; note = 2'-O-methyluridine-3'-phosphate N-[tris(GalNAc-alkyl)-amidodecanoyl)]-4-hydroxyprolinol (Hyp-(GalNAc-alkyl)3)
ctccctcaactggatgaagat

SEQ ID NO: 3209 - RNA, 21 nt, synthetic construct
  source 1..21: mol_type = other RNA
  modified_base 1: mod_base = OTHER; note = 2'-O-methyluridine-3'-phosphorothioate
  modified_base 2: mod_base = OTHER; note = 2'-O-methylcytidine-3'-phosphorothioate
  modified_base 3: mod_base = OTHER; note = 2'-O-methylcytidine-3'-phosphate
  modified_base 4: mod_base = OTHER; note = 2'-O-methylcytidine-3'-phosphate
  modified_base 5: mod_base = OTHER; note = 2'-O-methyluridine-3'-phosphate
  modified_base 6: mod_base = OTHER; note = 2'-O-methylcytidine-3'-phosphate
  modified_base 7: mod_base = OTHER; note = 2'-fluoroadenosine-3'-phosphate
  modified_base 8: mod_base = OTHER; note = 2'-O-methyladenosine-3'-phosphate
  modified_base 9: mod_base = OTHER; note = 2'-fluorocytidine-3'-phosphate
  modified_base 10: mod_base = OTHER; note = 2'-fluorouridine-3'-phosphate
  modified_base 11: mod_base = OTHER; note = 2'-fluoroguanosine-3'-phosphate
  modified_base 12: mod_base = OTHER; note = 2'-O-methylguanosine-3'-phosphate
  modified_base 13: mod_base = OTHER; note = 2'-O-methyladenosine-3'-phosphate
  modified_base 14: mod_base = OTHER; note = 2'-O-methyluridine-3'-phosphate
  modified_base 15: mod_base = OTHER; note = 2'-O-methylguanosine-3'-phosphate
  modified_base 16: mod_base = OTHER; note = 2'-O-methyladenosine-3'-phosphate
  modified_base 17: mod_base = OTHER; note = 2'-O-methyladenosine-3'-phosphate
  modified_base 18: mod_base = OTHER; note = 2'-O-methylguanosine-3'-phosphate
  modified_base 19: mod_base = OTHER; note = 2'-O-methyladenosine-3'-phosphate
  modified_base 20: mod_base = OTHER; note = 2'-O-methyladenosine-3'-phosphate
  modified_base 21: mod_base = OTHER; note = 2'-O-methyluridine-3'-phosphate N-[tris(GalNAc-alkyl)-amidodecanoyl)]-4-hydroxyprolinol (Hyp-(GalNAc-alkyl)3)
tccctcaactggatgaagaat

SEQ ID NO: 3210 - RNA, 21 nt, synthetic construct
  source 1..21: mol_type = other RNA
  modified_base 1: mod_base = OTHER; note = 2'-O-methylcytidine-3'-phosphorothioate
  modified_base 2: mod_base = OTHER; note = 2'-O-methylcytidine-3'-phosphorothioate
  modified_base 3: mod_base = OTHER; note = 2'-O-methylcytidine-3'-phosphate
  modified_base 4: mod_base = OTHER; note = 2'-O-methyluridine-3'-phosphate
  modified_base 5: mod_base = OTHER; note = 2'-O-methylcytidine-3'-phosphate
  modified_base 6: mod_base = OTHER; note = 2'-O-methyladenosine-3'-phosphate
  modified_base 7: mod_base = OTHER; note = 2'-fluoroadenosine-3'-phosphate
  modified_base 8: mod_base = OTHER; note = 2'-O-methylcytidine-3'-phosphate
  modified_base 9: mod_base = OTHER; note = 2'-fluorouridine-3'-phosphate
  modified_base 10: mod_base = OTHER; note = 2'-fluoroguanosine-3'-phosphate
  modified_base 11: mod_base = OTHER; note = 2'-fluoroguanosine-3'-phosphate
  modified_base 12: mod_base = OTHER; note = 2'-O-methyladenosine-3'-phosphate
  modified_base 13: mod_base = OTHER; note = 2'-O-methyluridine-3'-phosphate
  modified_base 14: mod_base = OTHER; note = 2'-O-methylguanosine-3'-phosphate
  modified_base 15: mod_base = OTHER; note = 2'-O-methyladenosine-3'-phosphate
  modified_base 16: mod_base = OTHER; note = 2'-O-methyladenosine-3'-phosphate
  modified_base 17: mod_base = OTHER; note = 2'-O-methylguanosine-3'-phosphate
  modified_base 18: mod_base = OTHER; note = 2'-O-methyladenosine-3'-phosphate
  modified_base 19: mod_base = OTHER; note = 2'-O-methyladenosine-3'-phosphate
  modified_base 20: mod_base = OTHER; note = 2'-O-methyladenosine-3'-phosphate
  modified_base 21: mod_base = OTHER; note = 2'-O-methyluridine-3'-phosphate N-[tris(GalNAc-alkyl)-amidodecanoyl)]-4-hydroxyprolinol (Hyp-(GalNAc-alkyl)3)
ccctcaactggatgaagaaat

SEQ ID NO: 3211 - RNA, 21 nt, synthetic construct
  source 1..21: mol_type = other RNA
  modified_base 1: mod_base = OTHER; note = 2'-O-methylcytidine-3'-phosphorothioate
  modified_base 2: mod_base = OTHER; note = 2'-O-methyluridine-3'-phosphorothioate
  modified_base 3: mod_base = OTHER; note = 2'-O-methylcytidine-3'-phosphate
  modified_base 4: mod_base = OTHER; note = 2'-O-methyladenosine-3'-phosphate
  modified_base 5: mod_base = OTHER; note = 2'-O-methyladenosine-3'-phosphate
  modified_base 6: mod_base = OTHER; note = 2'-O-methylcytidine-3'-phosphate
  modified_base 7: mod_base = OTHER; note = 2'-fluorouridine-3'-phosphate
  modified_base 8: mod_base = OTHER; note = 2'-O-methylguanosine-3'-phosphate
  modified_base 9: mod_base = OTHER; note = 2'-fluoroguanosine-3'-phosphate
  modified_base 10: mod_base = OTHER; note = 2'-fluoroadenosine-3'-phosphate
  modified_base 11: mod_base = OTHER; note = 2'-fluorouridine-3'-phosphate
  modified_base 12: mod_base = OTHER; note = 2'-O-methylguanosine-3'-phosphate
  modified_base 13: mod_base = OTHER; note = 2'-O-methyladenosine-3'-phosphate
  modified_base 14: mod_base = OTHER; note = 2'-O-methyladenosine-3'-phosphate
  modified_base 15: mod_base = OTHER; note = 2'-O-methylguanosine-3'-phosphate
  modified_base 16: mod_base = OTHER; note = 2'-O-methyladenosine-3'-phosphate
  modified_base 17: mod_base = OTHER; note = 2'-O-methyladenosine-3'-phosphate
  modified_base 18: mod_base = OTHER; note = 2'-O-methyladenosine-3'-phosphate
  modified_base 19: mod_base = OTHER; note = 2'-O-methylcytidine-3'-phosphate
  modified_base 20: mod_base = OTHER; note = 2'-O-methyluridine-3'-phosphate
  modified_base 21: mod_base = OTHER; note = 2'-O-methyluridine-3'-phosphate N-[tris(GalNAc-alkyl)-amidodecanoyl)]-4-hydroxyprolinol (Hyp-(GalNAc-alkyl)3)
ctcaactggatgaagaaactt

SEQ ID NO: 3212 - RNA, 21 nt, synthetic construct
  source 1..21: mol_type = other RNA
  modified_base 1: mod_base = OTHER; note = 2'-O-methyladenosine-3'-phosphorothioate
  modified_base 2: mod_base = OTHER; note = 2'-O-methylguanosine-3'-phosphorothioate
  modified_base 3: mod_base = OTHER; note = 2'-O-methylguanosine-3'-phosphate
  modified_base 4: mod_base = OTHER; note = 2'-O-methyladenosine-3'-phosphate
  modified_base 5: mod_base = OTHER; note = 2'-O-methyluridine-3'-phosphate
  modified_base 6: mod_base = OTHER; note = 2'-O-methylcytidine-3'-phosphate
  modified_base 7: mod_base = OTHER; note = 2'-fluorouridine-3'-phosphate
  modified_base 8: mod_base = OTHER; note = 2'-O-methyluridine-3'-phosphate
  modified_base 9: mod_base = OTHER; note = 2'-fluoroadenosine-3'-phosphate
  modified_base 10: mod_base = OTHER; note = 2'-fluorouridine-3'-phosphate
  modified_base 11: mod_base = OTHER; note = 2'-fluoroguanosine-3'-phosphate
  modified_base 12: mod_base = OTHER; note = 2'-O-methyladenosine-3'-phosphate
  modified_base 13: mod_base = OTHER; note = 2'-O-methylcytidine-3'-phosphate
  modified_base 14: mod_base = OTHER; note = 2'-O-methylcytidine-3'-phosphate
  modified_base 15: mod_base = OTHER; note = 2'-O-methyluridine-3'-phosphate
  modified_base 16: mod_base = OTHER; note = 2'-O-methylguanosine-3'-phosphate
  modified_base 17: mod_base = OTHER; note = 2'-O-methylcytidine-3'-phosphate
  modified_base 18: mod_base = OTHER; note = 2'-O-methyladenosine-3'-phosphate
  modified_base 19: mod_base = OTHER; note = 2'-O-methylguanosine-3'-phosphate
  modified_base 20: mod_base = OTHER; note = 2'-O-methylguanosine-3'-phosphate
  modified_base 21: mod_base = OTHER; note = 2'-O-methyluridine-3'-phosphate N-[tris(GalNAc-alkyl)-amidodecanoyl)]-4-hydroxyprolinol (Hyp-(GalNAc-alkyl)3)
aggatcttatgacctgcaggt

SEQ ID NO: 3213 - RNA, 21 nt, synthetic construct
  source 1..21: mol_type = other RNA
  modified_base 1: mod_base = OTHER; note = 2'-O-methylguanosine-3'-phosphorothioate
  modified_base 2: mod_base = OTHER; note = 2'-O-methyladenosine-3'-phosphorothioate
  modified_base 3: mod_base = OTHER; note = 2'-O-methyladenosine-3'-phosphate
  modified_base 4: mod_base = OTHER; note = 2'-O-methylcytidine-3'-phosphate
  modified_base 5: mod_base = OTHER; note = 2'-O-methylcytidine-3'-phosphate
  modified_base 6: mod_base = OTHER; note = 2'-O-methyluridine-3'-phosphate
  modified_base 7: mod_base = OTHER; note = 2'-fluoroguanosine-3'-phosphate
  modified_base 8: mod_base = OTHER; note = 2'-O-methylcytidine-3'-phosphate
  modified_base 9: mod_base = OTHER; note = 2'-fluoroadenosine-3'-phosphate
  modified_base 10: mod_base = OTHER; note = 2'-fluoroadenosine-3'-phosphate
  modified_base 11: mod_base = OTHER; note = 2'-fluoroadenosine-3'-phosphate
  modified_base 12: mod_base = OTHER; note = 2'-O-methyladenosine-3'-phosphate
  modified_base 13: mod_base = OTHER; note = 2'-O-methyladenosine-3'-phosphate
  modified_base 14: mod_base = OTHER; note = 2'-O-methyluridine-3'-phosphate
  modified_base 15: mod_base = OTHER; note = 2'-O-methyluridine-3'-phosphate
  modified_base 16: mod_base = OTHER; note = 2'-O-methylguanosine-3'-phosphate
  modified_base 17: mod_base = OTHER; note = 2'-O-methyladenosine-3'-phosphate
  modified_base 18: mod_base = OTHER; note = 2'-O-methylguanosine-3'-phosphate
  modified_base 19: mod_base = OTHER; note = 2'-O-methylcytidine-3'-phosphate
  modified_base 20: mod_base = OTHER; note = 2'-O-methyladenosine-3'-phosphate
  modified_base 21: mod_base = OTHER; note = 2'-O-methyluridine-3'-phosphate N-[tris(GalNAc-alkyl)-amidodecanoyl)]-4-hydroxyprolinol (Hyp-(GalNAc-alkyl)3)
gaacctgcaaaaattgagcat

SEQ ID NO: 3214 - RNA, 21 nt, synthetic construct
  source 1..21: mol_type = other RNA
  modified_base 1: mod_base = OTHER; note = 2'-O-methyladenosine-3'-phosphorothioate
  modified_base 2: mod_base = OTHER; note = 2'-O-methyladenosine-3'-phosphorothioate
  modified_base 3: mod_base = OTHER; note = 2'-O-methylcytidine-3'-phosphate
  modified_base 4: mod_base = OTHER; note = 2'-O-methylcytidine-3'-phosphate
  modified_base 5: mod_base = OTHER; note = 2'-O-methyluridine-3'-phosphate
  modified_base 6: mod_base = OTHER; note = 2'-O-methylguanosine-3'-phosphate
  modified_base 7: mod_base = OTHER; note = 2'-fluorocytidine-3'-phosphate
  modified_base 8: mod_base = OTHER; note = 2'-O-methyladenosine-3'-phosphate
  modified_base 9: mod_base = OTHER; note = 2'-fluoroadenosine-3'-phosphate
  modified_base 10: mod_base = OTHER; note = 2'-fluoroadenosine-3'-phosphate
  modified_base 11: mod_base = OTHER; note = 2'-fluoroadenosine-3'-phosphate
  modified_base 12: mod_base = OTHER; note = 2'-O-methyladenosine-3'-phosphate
  modified_base 13: mod_base = OTHER; note = 2'-O-methyluridine-3'-phosphate
  modified_base 14: mod_base = OTHER; note = 2'-O-methyluridine-3'-phosphate
  modified_base 15: mod_base = OTHER; note = 2'-O-methylguanosine-3'-phosphate
  modified_base 16: mod_base = OTHER; note = 2'-O-methyladenosine-3'-phosphate
  modified_base 17: mod_base = OTHER; note = 2'-O-methylguanosine-3'-phosphate
  modified_base 18: mod_base = OTHER; note = 2'-O-methylcytidine-3'-phosphate
  modified_base 19: mod_base = OTHER; note = 2'-O-methyladenosine-3'-phosphate
  modified_base 20: mod_base = OTHER; note = 2'-O-methyladenosine-3'-phosphate
  modified_base 21: mod_base = OTHER; note = 2'-O-methyluridine-3'-phosphate N-[tris(GalNAc-alkyl)-amidodecanoyl)]-4-hydroxyprolinol (Hyp-(GalNAc-alkyl)3)
aacctgcaaaaattgagcaat

SEQ ID NO: 3215 - RNA, 21 nt, synthetic construct
  source 1..21: mol_type = other RNA
  modified_base 1: mod_base = OTHER; note = 2'-O-methyladenosine-3'-phosphorothioate
  modified_base 2: mod_base = OTHER; note = 2'-O-methylcytidine-3'-phosphorothioate
  modified_base 3: mod_base = OTHER; note = 2'-O-methylcytidine-3'-phosphate
  modified_base 4: mod_base = OTHER; note = 2'-O-methyluridine-3'-phosphate
  modified_base 5: mod_base = OTHER; note = 2'-O-methylguanosine-3'-phosphate
  modified_base 6: mod_base = OTHER; note = 2'-O-methylcytidine-3'-phosphate
  modified_base 7: mod_base = OTHER; note = 2'-fluoroadenosine-3'-phosphate
  modified_base 8: mod_base = OTHER; note = 2'-O-methyladenosine-3'-phosphate
  modified_base 9: mod_base = OTHER; note = 2'-fluoroadenosine-3'-phosphate
  modified_base 10: mod_base = OTHER; note = 2'-fluoroadenosine-3'-phosphate
  modified_base 11: mod_base = OTHER; note = 2'-fluoroadenosine-3'-phosphate
  modified_base 12: mod_base = OTHER; note = 2'-O-methyluridine-3'-phosphate
  modified_base 13: mod_base = OTHER; note = 2'-O-methyluridine-3'-phosphate
  modified_base 14: mod_base = OTHER; note = 2'-O-methylguanosine-3'-phosphate
  modified_base 15: mod_base = OTHER; note = 2'-O-methyladenosine-3'-phosphate
  modified_base 16: mod_base = OTHER; note = 2'-O-methylguanosine-3'-phosphate
  modified_base 17: mod_base = OTHER; note = 2'-O-methylcytidine-3'-phosphate
  modified_base 18: mod_base = OTHER; note = 2'-O-methyladenosine-3'-phosphate
  modified_base 19: mod_base = OTHER; note = 2'-O-methyladenosine-3'-phosphate
  modified_base 20: mod_base = OTHER; note = 2'-O-methyluridine-3'-phosphate
  modified_base 21: mod_base = OTHER; note = 2'-O-methyluridine-3'-phosphate N-[tris(GalNAc-alkyl)-amidodecanoyl)]-4-hydroxyprolinol (Hyp-(GalNAc-alkyl)3)
acctgcaaaaattgagcaatt

SEQ ID NO: 3216 - RNA, 21 nt, synthetic construct
  source 1..21: mol_type = other RNA
  modified_base 1: mod_base = OTHER; note = 2'-O-methylcytidine-3'-phosphorothioate
  modified_base 2: mod_base = OTHER; note = 2'-O-methylcytidine-3'-phosphorothioate
  modified_base 3: mod_base = OTHER; note = 2'-O-methyluridine-3'-phosphate
  modified_base 4: mod_base = OTHER; note = 2'-O-methylguanosine-3'-phosphate
  modified_base 5: mod_base = OTHER; note = 2'-O-methylcytidine-3'-phosphate
  modified_base 6: mod_base = OTHER; note = 2'-O-methyladenosine-3'-phosphate
  modified_base 7: mod_base = OTHER; note = 2'-fluoroadenosine-3'-phosphate
  modified_base 8: mod_base = OTHER; note = 2'-O-methyladenosine-3'-phosphate
  modified_base 9: mod_base = OTHER; note = 2'-fluoroadenosine-3'-phosphate
  modified_base 10: mod_base = OTHER; note = 2'-fluoroadenosine-3'-phosphate
  modified_base 11: mod_base = OTHER; note = 2'-fluorouridine-3'-phosphate
  modified_base 12: mod_base = OTHER; note = 2'-O-methyluridine-3'-phosphate
  modified_base 13: mod_base = OTHER; note = 2'-O-methylguanosine-3'-phosphate
  modified_base 14: mod_base = OTHER; note = 2'-O-methyladenosine-3'-phosphate
  modified_base 15: mod_base = OTHER; note = 2'-O-methylguanosine-3'-phosphate
  modified_base 16: mod_base = OTHER; note = 2'-O-methylcytidine-3'-phosphate
  modified_base 17: mod_base = OTHER; note = 2'-O-methyladenosine-3'-phosphate
  modified_base 18: mod_base = OTHER; note = 2'-O-methyladenosine-3'-phosphate
  modified_base 19: mod_base = OTHER; note = 2'-O-methyluridine-3'-phosphate
  modified_base 20: mod_base = OTHER; note = 2'-O-methylguanosine-3'-phosphate
  modified_base 21: mod_base = OTHER; note = 2'-O-methyluridine-3'-phosphate N-[tris(GalNAc-alkyl)-amidodecanoyl)]-4-hydroxyprolinol (Hyp-(GalNAc-alkyl)3)
cctgcaaaaattgagcaatgt

SEQ ID NO: 3217 - RNA, 21 nt, synthetic construct
  source 1..21: mol_type = other RNA
  modified_base 1: mod_base = OTHER; note = 2'-O-methylcytidine-3'-phosphorothioate
  modified_base 2: mod_base = OTHER; note = 2'-O-methyluridine-3'-phosphorothioate
  modified_base 3: mod_base = OTHER; note = 2'-O-methylguanosine-3'-phosphate
  modified_base 4: mod_base = OTHER; note = 2'-O-methylcytidine-3'-phosphate
  modified_base 5: mod_base = OTHER; note = 2'-O-methyladenosine-3'-phosphate
  modified_base 6: mod_base = OTHER; note = 2'-O-methyladenosine-3'-phosphate
  modified_base 7: mod_base = OTHER; note = 2'-fluoroadenosine-3'-phosphate
  modified_base 8: mod_base = OTHER; note = 2'-O-methyladenosine-3'-phosphate
  modified_base 9: mod_base = OTHER; note = 2'-fluoroadenosine-3'-phosphate
  modified_base 10: mod_base = OTHER; note = 2'-fluorouridine-3'-phosphate
  modified_base 11: mod_base = OTHER; note = 2'-fluorouridine-3'-phosphate
  modified_base 12: mod_base = OTHER; note = 2'-O-methylguanosine-3'-phosphate
  modified_base 13: mod_base = OTHER; note = 2'-O-methyladenosine-3'-phosphate
  modified_base 14: mod_base = OTHER; note = 2'-O-methylguanosine-3'-phosphate
  modified_base 15: mod_base = OTHER; note = 2'-O-methylcytidine-3'-phosphate
  modified_base 16: mod_base = OTHER; note = 2'-O-methyladenosine-3'-phosphate
  modified_base 17: mod_base = OTHER; note = 2'-O-methyladenosine-3'-phosphate
  modified_base 18: mod_base = OTHER; note = 2'-O-methyluridine-3'-phosphate
  modified_base 19: mod_base = OTHER; note = 2'-O-methylguanosine-3'-phosphate
  modified_base 20: mod_base = OTHER; note = 2'-O-methyladenosine-3'-phosphate
  modified_base 21: mod_base = OTHER; note = 2'-O-methyluridine-3'-phosphate N-[tris(GalNAc-alkyl)-amidodecanoyl)]-4-hydroxyprolinol (Hyp-(GalNAc-alkyl)3)
ctgcaaaaattgagcaatgat

SEQ ID NO: 3218 - RNA, 21 nt, synthetic construct
  source 1..21: mol_type = other RNA
  modified_base 1: mod_base = OTHER; note = 2'-O-methyluridine-3'-phosphorothioate
  modified_base 2: mod_base = OTHER; note = 2'-O-methylguanosine-3'-phosphorothioate
  modified_base 3: mod_base = OTHER; note = 2'-O-methyladenosine-3'-phosphate
  modified_base 4: mod_base = OTHER; note = 2'-O-methylguanosine-3'-phosphate
  modified_base 5: mod_base = OTHER; note = 2'-O-methyladenosine-3'-phosphate
  modified_base 6: mod_base = OTHER; note = 2'-O-methylguanosine-3'-phosphate
  modified_base 7: mod_base = OTHER; note = 2'-fluoroadenosine-3'-phosphate
  modified_base 8: mod_base = OTHER; note = 2'-O-methylguanosine-3'-phosphate
  modified_base 9: mod_base = OTHER; note = 2'-fluoroadenosine-3'-phosphate
  modified_base 10: mod_base = OTHER; note = 2'-fluoroguanosine-3'-phosphate
  modified_base 11: mod_base = OTHER; note = 2'-fluorocytidine-3'-phosphate
  modified_base 12: mod_base = OTHER; note = 2'-O-methylcytidine-3'-phosphate
  modified_base 13: mod_base = OTHER; note = 2'-O-methylcytidine-3'-phosphate
  modified_base 14: mod_base = OTHER; note = 2'-O-methyladenosine-3'-phosphate
  modified_base 15: mod_base = OTHER; note = 2'-O-methylcytidine-3'-phosphate
  modified_base 16: mod_base = OTHER; note = 2'-O-methyladenosine-3'-phosphate
  modified_base 17: mod_base = OTHER; note = 2'-O-methylguanosine-3'-phosphate
  modified_base 18: mod_base = OTHER; note = 2'-O-methyladenosine-3'-phosphate
  modified_base 19: mod_base = OTHER; note = 2'-O-methylguanosine-3'-phosphate
  modified_base 20: mod_base = OTHER; note = 2'-O-methyluridine-3'-phosphate
  modified_base 21: mod_base = OTHER; note = 2'-O-methyluridine-3'-phosphate N-[tris(GalNAc-alkyl)-amidodecanoyl)]-4-hydroxyprolinol (Hyp-(GalNAc-alkyl)3)
tgagagagagcccacagagtt

SEQ ID NO: 3219 - RNA, 21 nt, synthetic construct
  source 1..21: mol_type = other RNA
  modified_base 1: mod_base = OTHER; note = 2'-O-methyladenosine-3'-phosphorothioate
  modified_base 2: mod_base = OTHER; note = 2'-O-methylguanosine-3'-phosphorothioate
  modified_base 3: mod_base = OTHER; note = 2'-O-methyladenosine-3'-phosphate
  modified_base 4: mod_base = OTHER; note = 2'-O-methylguanosine-3'-phosphate
  modified_base 5: mod_base = OTHER; note = 2'-O-methyladenosine-3'-phosphate
  modified_base 6: mod_base = OTHER; note = 2'-O-methylguanosine-3'-phosphate
  modified_base 7: mod_base = OTHER; note = 2'-fluoroadenosine-3'-phosphate
  modified_base 8: mod_base = OTHER; note = 2'-O-methylguanosine-3'-phosphate
  modified_base 9: mod_base = OTHER; note = 2'-fluorocytidine-3'-phosphate
  modified_base 10: mod_base = OTHER; note = 2'-fluorocytidine-3'-phosphate
  modified_base 11: mod_base = OTHER; note = 2'-fluorocytidine-3'-phosphate
  modified_base 12: mod_base = OTHER; note = 2'-O-methyladenosine-3'-phosphate
  modified_base 13: mod_base = OTHER; note = 2'-O-methylcytidine-3'-phosphate
  modified_base 14: mod_base = OTHER; note = 2'-O-methyladenosine-3'-phosphate
  modified_base 15: mod_base = OTHER; note = 2'-O-methylguanosine-3'-phosphate
  modified_base 16: mod_base = OTHER; note = 2'-O-methyladenosine-3'-phosphate
  modified_base 17: mod_base = OTHER; note = 2'-O-methylguanosine-3'-phosphate
  modified_base 18: mod_base = OTHER; note = 2'-O-methyluridine-3'-phosphate
  modified_base 19: mod_base = OTHER; note = 2'-O-methylcytidine-3'-phosphate
  modified_base 20: mod_base = OTHER; note = 2'-O-methyluridine-3'-phosphate
  modified_base 21: mod_base = OTHER; note = 2'-O-methyluridine-3'-phosphate N-[tris(GalNAc-alkyl)-amidodecanoyl)]-4-hydroxyprolinol (Hyp-(GalNAc-alkyl)3)
agagagagcccacagagtctt

SEQ ID NO: 3220 - RNA, 21 nt, synthetic construct
  source 1..21: mol_type = other RNA
  modified_base 1: mod_base = OTHER; note = 2'-O-methylguanosine-3'-phosphorothioate
  modified_base 2: mod_base = OTHER; note = 2'-O-methyladenosine-3'-phosphorothioate
  modified_base 3: mod_base = OTHER; note = 2'-O-methylguanosine-3'-phosphate
  modified_base 4: mod_base = OTHER; note = 2'-O-methyladenosine-3'-phosphate
  modified_base 5: mod_base = OTHER; note = 2'-O-methylguanosine-3'-phosphate
  modified_base 6: mod_base = OTHER; note = 2'-O-methyladenosine-3'-phosphate
  modified_base 7: mod_base = OTHER; note = 2'-fluoroguanosine-3'-phosphate
  modified_base 8: mod_base = OTHER; note = 2'-O-methylcytidine-3'-phosphate
  modified_base 9: mod_base = OTHER; note = 2'-fluorocytidine-3'-phosphate
  modified_base 10: mod_base = OTHER; note = 2'-fluorocytidine-3'-phosphate
  modified_base 11: mod_base = OTHER; note = 2'-fluoroadenosine-3'-phosphate
  modified_base 12: mod_base = OTHER; note = 2'-O-methylcytidine-3'-phosphate
  modified_base 13: mod_base = OTHER; note = 2'-O-methyladenosine-3'-phosphate
  modified_base 14: mod_base = OTHER; note = 2'-O-methylguanosine-3'-phosphate
  modified_base 15: mod_base = OTHER; note = 2'-O-methyladenosine-3'-phosphate
  modified_base 16: mod_base = OTHER; note = 2'-O-methylguanosine-3'-phosphate
  modified_base 17: mod_base = OTHER; note = 2'-O-methyluridine-3'-phosphate
  modified_base 18: mod_base = OTHER; note = 2'-O-methylcytidine-3'-phosphate
  modified_base 19: mod_base = OTHER; note = 2'-O-methyluridine-3'-phosphate
  modified_base 20: mod_base = OTHER; note = 2'-O-methyladenosine-3'-phosphate
  modified_base 21: mod_base = OTHER; note = 2'-O-methyluridine-3'-phosphate N-[tris(GalNAc-alkyl)-amidodecanoyl)]-4-hydroxyprolinol (Hyp-(GalNAc-alkyl)3)
gagagagcccacagagtctat

SEQ ID NO: 3221 - RNA, 21 nt, synthetic construct
  source 1..21: mol_type = other RNA
  modified_base 1: mod_base = OTHER; note = 2'-O-methylguanosine-3'-phosphorothioate
  modified_base 2: mod_base = OTHER; note = 2'-O-methyladenosine-3'-phosphorothioate
  modified_base 3: mod_base = OTHER; note = 2'-O-methyladenosine-3'-phosphate
  modified_base 4: mod_base = OTHER; note = 2'-O-methylcytidine-3'-phosphate
  modified_base 5: mod_base = OTHER; note = 2'-O-methylcytidine-3'-phosphate
  modified_base 6: mod_base = OTHER; note = 2'-O-methylguanosine-3'-phosphate
  modified_base 7: mod_base = OTHER; note = 2'-fluorocytidine-3'-phosphate
  modified_base 8: mod_base = OTHER; note = 2'-O-methylcytidine-3'-phosphate
  modified_base 9: mod_base = OTHER; note = 2'-fluorocytidine-3'-phosphate
  modified_base 10: mod_base = OTHER; note = 2'-fluoroadenosine-3'-phosphate
  modified_base 11: mod_base = OTHER; note = 2'-fluorouridine-3'-phosphate
  modified_base 12: mod_base = OTHER; note = 2'-O-methyluridine-3'-phosphate
  modified_base 13: mod_base = OTHER; note = 2'-O-methylcytidine-3'-phosphate
  modified_base 14: mod_base = OTHER; note = 2'-O-methylcytidine-3'-phosphate
  modified_base 15: mod_base = OTHER; note = 2'-O-methyluridine-3'-phosphate
  modified_base 16: mod_base = OTHER; note = 2'-O-methylguanosine-3'-phosphate
  modified_base 17: mod_base = OTHER; note = 2'-O-methyluridine-3'-phosphate
  modified_base 18: mod_base = OTHER; note = 2'-O-methyluridine-3'-phosphate
  modified_base 19: mod_base = OTHER; note = 2'-O-methyluridine-3'-phosphate
  modified_base 20: mod_base = OTHER; note = 2'-O-methylguanosine-3'-phosphate
  modified_base 21: mod_base = OTHER; note = 2'-O-methyluridine-3'-phosphate N-[tris(GalNAc-alkyl)-amidodecanoyl)]-4-hydroxyprolinol (Hyp-(GalNAc-alkyl)3)
gaaccgcccattcctgtttgt

SEQ ID NO: 3222 - RNA, 21 nt, synthetic construct
  source 1..21: mol_type = other RNA
  modified_base 1: mod_base = OTHER; note = 2'-O-methylguanosine-3'-phosphorothioate
  modified_base 2: mod_base = OTHER; note = 2'-O-methylcytidine-3'-phosphorothioate
  modified_base 3: mod_base = OTHER; note = 2'-O-methylcytidine-3'-phosphate
  modified_base 4: mod_base = OTHER; note = 2'-O-methylcytidine-3'-phosphate
  modified_base 5: mod_base = OTHER; note = 2'-O-methyladenosine-3'-phosphate
  modified_base 6: mod_base = OTHER; note = 2'-O-methyluridine-3'-phosphate
  modified_base 7: mod_base = OTHER; note = 2'-fluorouridine-3'-phosphate
  modified_base 8: mod_base = OTHER; note = 2'-O-methylcytidine-3'-phosphate
  modified_base 9: mod_base = OTHER; note = 2'-fluorocytidine-3'-phosphate
  modified_base 10: mod_base = OTHER; note = 2'-fluorouridine-3'-phosphate
  modified_base 11: mod_base = OTHER; note = 2'-fluoroguanosine-3'-phosphate
  modified_base 12: mod_base = OTHER; note = 2'-O-methyluridine-3'-phosphate
  modified_base 13: mod_base = OTHER; note = 2'-O-methyluridine-3'-phosphate
  modified_base 14: mod_base = OTHER; note = 2'-O-methyluridine-3'-phosphate
  modified_base 15: mod_base = OTHER; note = 2'-O-methylguanosine-3'-phosphate
  modified_base 16: mod_base = OTHER; note = 2'-O-methylcytidine-3'-phosphate
  modified_base 17: mod_base = OTHER; note = 2'-O-methyluridine-3'-phosphate
  modified_base 18: mod_base = OTHER; note = 2'-O-methylguanosine-3'-phosphate
  modified_base 19: mod_base = OTHER; note = 2'-O-methyluridine-3'-phosphate
  modified_base 20: mod_base = OTHER; note = 2'-O-methylguanosine-3'-phosphate
  modified_base 21: mod_base = OTHER; note = 2'-O-methyluridine-3'-phosphate N-[tris(GalNAc-alkyl)-amidodecanoyl)]-4-hydroxyprolinol (Hyp-(GalNAc-alkyl)3)
gcccattcctgtttgctgtgt

SEQ ID NO: 3223 - RNA, 21 nt, synthetic construct
  source 1..21: mol_type = other RNA
  modified_base 1: mod_base = OTHER; note = 2'-O-methylcytidine-3'-phosphorothioate
  modified_base 2: mod_base = OTHER; note = 2'-O-methylcytidine-3'-phosphorothioate
  modified_base 3: mod_base = OTHER; note = 2'-O-methylcytidine-3'-phosphate
  modified_base 4: mod_base = OTHER; note = 2'-O-methyladenosine-3'-phosphate
  modified_base 5: mod_base = OTHER; note = 2'-O-methyluridine-3'-phosphate
  modified_base 6: mod_base = OTHER; note = 2'-O-methyluridine-3'-phosphate
  modified_base 7: mod_base = OTHER; note = 2'-fluorocytidine-3'-phosphate
  modified_base 8: mod_base = OTHER; note = 2'-O-methylcytidine-3'-phosphate
  modified_base 9: mod_base = OTHER; note = 2'-fluorouridine-3'-phosphate
  modified_base 10: mod_base = OTHER; note = 2'-fluoroguanosine-3'-phosphate
  modified_base 11: mod_base = OTHER; note = 2'-fluorouridine-3'-phosphate
  modified_base 12: mod_base = OTHER; note = 2'-O-methyluridine-3'-phosphate
  modified_base 13: mod_base = OTHER; note = 2'-O-methyluridine-3'-phosphate
  modified_base 14: mod_base = OTHER; note = 2'-O-methylguanosine-3'-phosphate
  modified_base 15: mod_base = OTHER; note = 2'-O-methylcytidine-3'-phosphate
  modified_base 16: mod_base = OTHER; note = 2'-O-methyluridine-3'-phosphate
  modified_base 17: mod_base = OTHER; note = 2'-O-methylguanosine-3'-phosphate
  modified_base 18: mod_base = OTHER; note = 2'-O-methyluridine-3'-phosphate
  modified_base 19: mod_base = OTHER; note = 2'-O-methylguanosine-3'-phosphate
  modified_base 20: mod_base = OTHER; note = 2'-O-methyluridine-3'-phosphate
  modified_base 21: mod_base = OTHER; note = 2'-O-methyluridine-3'-phosphate N-[tris(GalNAc-alkyl)-amidodecanoyl)]-4-hydroxyprolinol (Hyp-(GalNAc-alkyl)3)
cccattcctgtttgctgtgtt

SEQ ID NO: 3224 - RNA, 21 nt, synthetic construct
  source 1..21: mol_type = other RNA
  modified_base 1: mod_base = OTHER; note = 2'-O-methylcytidine-3'-phosphorothioate
  modified_base 2: mod_base = OTHER; note = 2'-O-methyladenosine-3'-phosphorothioate
  modified_base 3: mod_base = OTHER; note = 2'-O-methyluridine-3'-phosphate
  modified_base 4: mod_base = OTHER; note = 2'-O-methyluridine-3'-phosphate
  modified_base 5: mod_base = OTHER; note = 2'-O-methylcytidine-3'-phosphate
  modified_base 6: mod_base = OTHER; note = 2'-O-methylcytidine-3'-phosphate
  modified_base 7: mod_base = OTHER; note = 2'-fluorouridine-3'-phosphate
  modified_base 8: mod_base = OTHER; note = 2'-O-methylguanosine-3'-phosphate
  modified_base 9: mod_base = OTHER; note = 2'-fluorouridine-3'-phosphate
  modified_base 10: mod_base = OTHER; note = 2'-fluorouridine-3'-phosphate
  modified_base 11: mod_base = OTHER; note = 2'-fluorouridine-3'-phosphate
  modified_base 12: mod_base = OTHER; note = 2'-O-methylguanosine-3'-phosphate
  modified_base 13: mod_base = OTHER; note = 2'-O-methylcytidine-3'-phosphate
  modified_base 14: mod_base = OTHER; note = 2'-O-methyluridine-3'-phosphate
  modified_base 15: mod_base = OTHER; note = 2'-O-methylguanosine-3'-phosphate
  modified_base 16: mod_base = OTHER; note = 2'-O-methyluridine-3'-phosphate
  modified_base 17: mod_base = OTHER; note = 2'-O-methylguanosine-3'-phosphate
  modified_base 18: mod_base = OTHER; note = 2'-O-methyluridine-3'-phosphate
  modified_base 19: mod_base = OTHER; note = 2'-O-methyladenosine-3'-phosphate
  modified_base 20: mod_base = OTHER; note = 2'-O-methyluridine-3'-phosphate
  modified_base 21: mod_base = OTHER; note = 2'-O-methyluridine-3'-phosphate N-[tris(GalNAc-alkyl)-amidodecanoyl)]-4-hydroxyprolinol (Hyp-(GalNAc-alkyl)3)
cattcctgtttgctgtgtatt

SEQ ID NO: 3225 - RNA, 21 nt, synthetic construct
  source 1..21: mol_type = other RNA
  modified_base 1: mod_base = OTHER; note = 2'-O-methyluridine-3'-phosphorothioate
  modified_base 2: mod_base = OTHER; note = 2'-O-methyluridine-3'-phosphorothioate
  modified_base 3: mod_base = OTHER; note = 2'-O-methylcytidine-3'-phosphate
  modified_base 4: mod_base = OTHER; note = 2'-O-methylcytidine-3'-phosphate
  modified_base 5: mod_base = OTHER; note = 2'-O-methyluridine-3'-phosphate
  modified_base 6: mod_base = OTHER; note = 2'-O-methylguanosine-3'-phosphate
  modified_base 7: mod_base = OTHER; note = 2'-fluorouridine-3'-phosphate
  modified_base 8: mod_base = OTHER; note = 2'-O-methyluridine-3'-phosphate
  modified_base 9: mod_base = OTHER; note = 2'-fluorouridine-3'-phosphate
  modified_base 10: mod_base = OTHER; note = 2'-fluoroguanosine-3'-phosphate
  modified_base 11: mod_base = OTHER; note = 2'-fluorocytidine-3'-phosphate
  modified_base 12: mod_base = OTHER; note = 2'-O-methyluridine-3'-phosphate
  modified_base 13: mod_base = OTHER; note = 2'-O-methylguanosine-3'-phosphate
  modified_base 14: mod_base = OTHER; note = 2'-O-methyluridine-3'-phosphate
  modified_base 15: mod_base = OTHER; note = 2'-O-methylguanosine-3'-phosphate
  modified_base 16: mod_base = OTHER; note = 2'-O-methyluridine-3'-phosphate
  modified_base 17: mod_base = OTHER; note = 2'-O-methyladenosine-3'-phosphate
  modified_base 18: mod_base = OTHER; note = 2'-O-methyluridine-3'-phosphate
  modified_base 19: mod_base = OTHER; note = 2'-O-methylguanosine-3'-phosphate
  modified_base 20: mod_base = OTHER; note = 2'-O-methyladenosine-3'-phosphate
  modified_base 21: mod_base = OTHER; note = 2'-O-methyluridine-3'-phosphate N-[tris(GalNAc-alkyl)-amidodecanoyl)]-4-hydroxyprolinol (Hyp-(GalNAc-alkyl)3)
ttcctgtttgctgtgtatgat

SEQ ID NO: 3226 - RNA, 21 nt, synthetic construct
  source 1..21: mol_type = other RNA
  modified_base 1: mod_base = OTHER; note = 2'-O-methylcytidine-3'-phosphorothioate
  modified_base 2: mod_base = OTHER; note = 2'-O-methylcytidine-3'-phosphorothioate
  modified_base 3: mod_base = OTHER; note = 2'-O-methyluridine-3'-phosphate
  modified_base 4: mod_base = OTHER; note = 2'-O-methylguanosine-3'-phosphate
  modified_base 5: mod_base = OTHER; note = 2'-O-methyluridine-3'-phosphate
  modified_base 6: mod_base = OTHER; note = 2'-O-methyluridine-3'-phosphate
  modified_base 7: mod_base = OTHER; note = 2'-fluorouridine-3'-phosphate
  modified_base 8: mod_base = OTHER; note = 2'-O-methylguanosine-3'-phosphate
  modified_base 9: mod_base = OTHER; note = 2'-fluorocytidine-3'-phosphate
  modified_base 10: mod_base = OTHER; note = 2'-fluorouridine-3'-phosphate
  modified_base 11: mod_base = OTHER; note = 2'-fluoroguanosine-3'-phosphate
  modified_base 12: mod_base = OTHER; note = 2'-O-methyluridine-3'-phosphate
  modified_base 13: mod_base = OTHER; note = 2'-O-methylguanosine-3'-phosphate
  modified_base 14: mod_base = OTHER; note = 2'-O-methyluridine-3'-phosphate
  modified_base 15: mod_base = OTHER; note = 2'-O-methyladenosine-3'-phosphate
  modified_base 16: mod_base = OTHER; note = 2'-O-methyluridine-3'-phosphate
  modified_base 17: mod_base = OTHER; note = 2'-O-methylguanosine-3'-phosphate
  modified_base 18: mod_base = OTHER; note = 2'-O-methyladenosine-3'-phosphate
  modified_base 19: mod_base = OTHER; note = 2'-O-methyluridine-3'-phosphate
  modified_base 20: mod_base = OTHER; note = 2'-O-methylcytidine-3'-phosphate
  modified_base 21: mod_base = OTHER; note = 2'-O-methyluridine-3'-phosphate N-[tris(GalNAc-alkyl)-amidodecanoyl)]-4-hydroxyprolinol (Hyp-(GalNAc-alkyl)3)
cctgtttgctgtgtatgatct

SEQ ID NO: 3227 - RNA, 21 nt, synthetic construct
  source 1..21: mol_type = other RNA
  modified_base 1: mod_base = OTHER; note = 2'-O-methylcytidine-3'-phosphorothioate
  modified_base 2: mod_base = OTHER; note = 2'-O-methyluridine-3'-phosphorothioate
  modified_base 3: mod_base = OTHER; note = 2'-O-methylguanosine-3'-phosphate
  modified_base 4: mod_base = OTHER; note = 2'-O-methyluridine-3'-phosphate
  modified_base 5: mod_base = OTHER; note = 2'-O-methyluridine-3'-phosphate
  modified_base 6: mod_base = OTHER; note = 2'-O-methyluridine-3'-phosphate
  modified_base 7: mod_base = OTHER; note = 2'-fluoroguanosine-3'-phosphate
  modified_base 8: mod_base = OTHER; note = 2'-O-methylcytidine-3'-phosphate
  modified_base 9: mod_base = OTHER; note = 2'-fluorouridine-3'-phosphate
  modified_base 10: mod_base = OTHER; note = 2'-fluoroguanosine-3'-phosphate
  modified_base 11: mod_base = OTHER; note = 2'-fluorouridine-3'-phosphate
  modified_base 12: mod_base = OTHER; note = 2'-O-methylguanosine-3'-phosphate
  modified_base 13: mod_base = OTHER; note = 2'-O-methyluridine-3'-phosphate
  modified_base 14: mod_base = OTHER; note = 2'-O-methyladenosine-3'-phosphate
  modified_base 15: mod_base = OTHER; note = 2'-O-methyluridine-3'-phosphate
  modified_base 16: mod_base = OTHER; note = 2'-O-methylguanosine-3'-phosphate
  modified_base 17: mod_base = OTHER; note = 2'-O-methyladenosine-3'-phosphate
  modified_base 18: mod_base = OTHER; note = 2'-O-methyluridine-3'-phosphate
  modified_base 19: mod_base = OTHER; note = 2'-O-methylcytidine-3'-phosphate
  modified_base 20: mod_base = OTHER; note = 2'-O-methyladenosine-3'-phosphate
  modified_base 21: mod_base = OTHER; note = 2'-O-methyluridine-3'-phosphate N-[tris(GalNAc-alkyl)-amidodecanoyl)]-4-hydroxyprolinol (Hyp-(GalNAc-alkyl)3)
ctgtttgctgtgtatgatcat

SEQ ID NO: 3228 - RNA, 21 nt, synthetic construct
  source 1..21: mol_type = other RNA
  modified_base 1: mod_base = OTHER; note = 2'-O-methyluridine-3'-phosphorothioate
  modified_base 2: mod_base = OTHER; note = 2'-O-methylguanosine-3'-phosphorothioate
  modified_base 3: mod_base = OTHER; note = 2'-O-methyluridine-3'-phosphate
  modified_base 4: mod_base = OTHER; note = 2'-O-methyluridine-3'-phosphate
  modified_base 5: mod_base = OTHER; note = 2'-O-methyluridine-3'-phosphate
  modified_base 6: mod_base = OTHER; note = 2'-O-methylguanosine-3'-phosphate
  modified_base 7: mod_base = OTHER; note = 2'-fluorocytidine-3'-phosphate
  modified_base 8: mod_base = OTHER; note = 2'-O-methyluridine-3'-phosphate
  modified_base 9: mod_base = OTHER; note = 2'-fluoroguanosine-3'-phosphate
  modified_base 10: mod_base = OTHER; note = 2'-fluorouridine-3'-phosphate
  modified_base 11: mod_base = OTHER; note = 2'-fluoroguanosine-3'-phosphate
  modified_base 12: mod_base = OTHER; note = 2'-O-methyluridine-3'-phosphate
  modified_base 13: mod_base = OTHER; note = 2'-O-methyladenosine-3'-phosphate
  modified_base 14: mod_base = OTHER; note = 2'-O-methyluridine-3'-phosphate
  modified_base 15: mod_base = OTHER; note = 2'-O-methylguanosine-3'-phosphate
  modified_base 16: mod_base = OTHER; note = 2'-O-methyladenosine-3'-phosphate
  modified_base 17: mod_base = OTHER; note = 2'-O-methyluridine-3'-phosphate
  modified_base 18: mod_base = OTHER; note = 2'-O-methylcytidine-3'-phosphate
  modified_base 19: mod_base = OTHER; note = 2'-O-methyladenosine-3'-phosphate
  modified_base 20: mod_base = OTHER; note = 2'-O-methyladenosine-3'-phosphate
  modified_base 21: mod_base = OTHER; note = 2'-O-methyluridine-3'-phosphate N-[tris(GalNAc-alkyl)-amidodecanoyl)]-4-hydroxyprolinol (Hyp-(GalNAc-alkyl)3)
tgtttgctgtgtatgatcaat

SEQ ID NO: 3229 - RNA, 21 nt, synthetic construct
  source 1..21: mol_type = other RNA
  modified_base 1: mod_base = OTHER; note = 2'-O-methylguanosine-3'-phosphorothioate
  modified_base 2: mod_base = OTHER; note = 2'-O-methyluridine-3'-phosphorothioate
  modified_base 3: mod_base = OTHER; note = 2'-O-methyluridine-3'-phosphate
  modified_base 4: mod_base = OTHER; note = 2'-O-methyluridine-3'-phosphate
  modified_base 5: mod_base = OTHER; note = 2'-O-methylguanosine-3'-phosphate
  modified_base 6: mod_base = OTHER; note = 2'-O-methylcytidine-3'-phosphate
  modified_base 7: mod_base = OTHER; note = 2'-fluorouridine-3'-phosphate
  modified_base 8: mod_base = OTHER; note = 2'-O-methylguanosine-3'-phosphate
  modified_base 9: mod_base = OTHER; note = 2'-fluorouridine-3'-phosphate
  modified_base 10: mod_base = OTHER; note = 2'-fluoroguanosine-3'-phosphate
  modified_base 11: mod_base = OTHER; note = 2'-fluorouridine-3'-phosphate
  modified_base 12: mod_base = OTHER; note = 2'-O-methyladenosine-3'-phosphate
  modified_base 13: mod_base = OTHER; note = 2'-O-methyluridine-3'-phosphate
  modified_base 14: mod_base = OTHER; note = 2'-O-methylguanosine-3'-phosphate
  modified_base 15: mod_base = OTHER; note = 2'-O-methyladenosine-3'-phosphate
  modified_base 16: mod_base = OTHER; note = 2'-O-methyluridine-3'-phosphate
  modified_base 17: mod_base = OTHER; note = 2'-O-methylcytidine-3'-phosphate
  modified_base 18: mod_base = OTHER; note = 2'-O-methyladenosine-3'-phosphate
  modified_base 19: mod_base = OTHER; note = 2'-O-methyladenosine-3'-phosphate
  modified_base 20: mod_base = OTHER; note = 2'-O-methyladenosine-3'-phosphate
  modified_base 21: mod_base = OTHER; note = 2'-O-methyluridine-3'-phosphate N-[tris(GalNAc-alkyl)-amidodecanoyl)]-4-hydroxyprolinol (Hyp-(GalNAc-alkyl)3)
gtttgctgtgtatgatcaaat

SEQ ID NO: 3230 - RNA, 21 nt, synthetic construct
  source 1..21: mol_type = other RNA
  modified_base 1: mod_base = OTHER; note = 2'-O-methyluridine-3'-phosphorothioate
  modified_base 2: mod_base = OTHER; note = 2'-O-methyluridine-3'-phosphorothioate
  modified_base 3: mod_base = OTHER; note = 2'-O-methyluridine-3'-phosphate
  modified_base 4: mod_base = OTHER; note = 2'-O-methylguanosine-3'-phosphate
  modified_base 5: mod_base = OTHER; note = 2'-O-methylcytidine-3'-phosphate
  modified_base 6: mod_base = OTHER; note = 2'-O-methyluridine-3'-phosphate
  modified_base 7: mod_base = OTHER; note = 2'-fluoroguanosine-3'-phosphate
  modified_base 8: mod_base = OTHER; note = 2'-O-methyluridine-3'-phosphate
  modified_base 9: mod_base = OTHER; note = 2'-fluoroguanosine-3'-phosphate
  modified_base 10: mod_base = OTHER; note = 2'-fluorouridine-3'-phosphate
  modified_base 11: mod_base = OTHER; note = 2'-fluoroadenosine-3'-phosphate
  modified_base 12: mod_base = OTHER; note = 2'-O-methyluridine-3'-phosphate
  modified_base 13: mod_base = OTHER; note = 2'-O-methylguanosine-3'-phosphate
  modified_base 14: mod_base = OTHER; note = 2'-O-methyladenosine-3'-phosphate
  modified_base 15: mod_base = OTHER; note = 2'-O-methyluridine-3'-phosphate
  modified_base 16: mod_base = OTHER; note = 2'-O-methylcytidine-3'-phosphate
  modified_base 17: mod_base = OTHER; note = 2'-O-methyladenosine-3'-phosphate
  modified_base 18: mod_base = OTHER; note = 2'-O-methyladenosine-3'-phosphate
  modified_base 19: mod_base = OTHER; note = 2'-O-methyladenosine-3'-phosphate
  modified_base 20: mod_base = OTHER; note = 2'-O-methylguanosine-3'-phosphate
  modified_base 21: mod_base = OTHER; note = 2'-O-methyluridine-3'-phosphate N-[tris(GalNAc-alkyl)-amidodecanoyl)]-4-hydroxyprolinol (Hyp-(GalNAc-alkyl)3)
tttgctgtgtatgatcaaagt

SEQ ID NO: 3231 - RNA, 21 nt, synthetic construct
  source 1..21: mol_type = other RNA
  modified_base 1: mod_base = OTHER; note = 2'-O-methylguanosine-3'-phosphorothioate
  modified_base 2: mod_base = OTHER; note = 2'-O-methyluridine-3'-phosphorothioate
  modified_base 3: mod_base = OTHER; note = 2'-O-methylcytidine-3'-phosphate
  modified_base 4: mod_base = OTHER; note = 2'-O-methyluridine-3'-phosphate
  modified_base 5: mod_base = OTHER; note = 2'-O-methylcytidine-3'-phosphate
  modified_base 6: mod_base = OTHER; note = 2'-O-methylcytidine-3'-phosphate
  modified_base 7: mod_base = OTHER; note = 2'-fluorocytidine-3'-phosphate
  modified_base 8: mod_base = OTHER; note = 2'-O-methyladenosine-3'-phosphate
  modified_base 9: mod_base = OTHER; note = 2'-fluorocytidine-3'-phosphate
  modified_base 10: mod_base = OTHER; note = 2'-fluorocytidine-3'-phosphate
  modified_base 11: mod_base = OTHER; note = 2'-fluorouridine-3'-phosphate
  modified_base 12: mod_base = OTHER; note = 2'-O-methyluridine-3'-phosphate
  modified_base 13: mod_base = OTHER; note = 2'-O-methyluridine-3'-phosphate
  modified_base 14: mod_base = OTHER; note = 2'-O-methyluridine-3'-phosphate
  modified_base 15: mod_base = OTHER; note = 2'-O-methylcytidine-3'-phosphate
  modified_base 16: mod_base = OTHER; note = 2'-O-methyluridine-3'-phosphate
  modified_base 17: mod_base = OTHER; note = 2'-O-methyluridine-3'-phosphate
  modified_base 18: mod_base = OTHER; note = 2'-O-methylcytidine-3'-phosphate
  modified_base 19: mod_base = OTHER; note = 2'-O-methyluridine-3'-phosphate
  modified_base 20: mod_base = OTHER; note = 2'-O-methyladenosine-3'-phosphate
  modified_base 21: mod_base = OTHER; note = 2'-O-methyluridine-3'-phosphate N-[tris(GalNAc-alkyl)-amidodecanoyl)]-4-hydroxyprolinol (Hyp-(GalNAc-alkyl)3)
gtctcccaccttttcttctat

SEQ ID NO: 3232 - RNA, 21 nt, synthetic construct
  source 1..21: mol_type = other RNA
  modified_base 1: mod_base = OTHER; note = 2'-O-methylcytidine-3'-phosphorothioate
  modified_base 2: mod_base = OTHER; note = 2'-O-methyladenosine-3'-phosphorothioate
  modified_base 3: mod_base = OTHER; note = 2'-O-methylcytidine-3'-phosphate
  modified_base 4: mod_base = OTHER; note = 2'-O-methylcytidine-3'-phosphate
  modified_base 5: mod_base = OTHER; note = 2'-O-methyluridine-3'-phosphate
  modified_base 6: mod_base = OTHER; note = 2'-O-methyluridine-3'-phosphate
  modified_base 7: mod_base = OTHER; note = 2'-fluorouridine-3'-phosphate
  modified_base 8: mod_base = OTHER; note = 2'-O-methyluridine-3'-phosphate
  modified_base 9: mod_base = OTHER; note = 2'-fluorocytidine-3'-phosphate
  modified_base 10: mod_base = OTHER; note = 2'-fluorouridine-3'-phosphate
  modified_base 11: mod_base = OTHER; note = 2'-fluorouridine-3'-phosphate
  modified_base 12: mod_base = OTHER; note = 2'-O-methylcytidine-3'-phosphate
  modified_base 13: mod_base = OTHER; note = 2'-O-methyluridine-3'-phosphate
  modified_base 14: mod_base = OTHER; note = 2'-O-methyladenosine-3'-phosphate
  modified_base 15: mod_base = OTHER; note = 2'-O-methyladenosine-3'-phosphate
  modified_base 16: mod_base = OTHER; note = 2'-O-methyluridine-3'-phosphate
  modified_base 17: mod_base = OTHER; note = 2'-O-methylguanosine-3'-phosphate
  modified_base 18: mod_base = OTHER; note = 2'-O-methyladenosine-3'-phosphate
  modified_base 19: mod_base = OTHER; note = 2'-O-methylguanosine-3'-phosphate
  modified_base 20: mod_base = OTHER; note = 2'-O-methyluridine-3'-phosphate
  modified_base 21: mod_base = OTHER; note = 2'-O-methyluridine-3'-phosphate N-[tris(GalNAc-alkyl)-amidodecanoyl)]-4-hydroxyprolinol (Hyp-(GalNAc-alkyl)3)
caccttttcttctaatgagtt

SEQ ID NO: 3233 - RNA, 21 nt, synthetic construct
  source 1..21: mol_type = other RNA
  modified_base 1: mod_base = OTHER; note = 2'-O-methyladenosine-3'-phosphorothioate
  modified_base 2: mod_base = OTHER; note = 2'-O-methylcytidine-3'-phosphorothioate
  modified_base 3: mod_base = OTHER; note = 2'-O-methylcytidine-3'-phosphate
  modified_base 4: mod_base = OTHER; note = 2'-O-methyluridine-3'-phosphate
  modified_base 5: mod_base = OTHER; note = 2'-O-methyluridine-3'-phosphate
  modified_base 6: mod_base = OTHER; note = 2'-O-methyluridine-3'-phosphate
  modified_base 7: mod_base = OTHER; note = 2'-fluorouridine-3'-phosphate
  modified_base 8: mod_base = OTHER; note = 2'-O-methylcytidine-3'-phosphate
  modified_base 9: mod_base = OTHER; note = 2'-fluorouridine-3'-phosphate
  modified_base 10: mod_base = OTHER; note = 2'-fluorouridine-3'-phosphate
  modified_base 11: mod_base = OTHER; note = 2'-fluorocytidine-3'-phosphate
  modified_base 12: mod_base = OTHER; note = 2'-O-methyluridine-3'-phosphate
  modified_base 13: mod_base = OTHER; note = 2'-O-methyladenosine-3'-phosphate
  modified_base 14: mod_base = OTHER; note = 2'-O-methyladenosine-3'-phosphate
  modified_base 15: mod_base = OTHER; note = 2'-O-methyluridine-3'-phosphate
  modified_base 16: mod_base = OTHER; note = 2'-O-methylguanosine-3'-phosphate
  modified_base 17: mod_base = OTHER; note = 2'-O-methyladenosine-3'-phosphate
  modified_base 18: mod_base = OTHER; note = 2'-O-methylguanosine-3'-phosphate
  modified_base 19: mod_base = OTHER; note = 2'-O-methyluridine-3'-phosphate
  modified_base 20: mod_base = OTHER; note = 2'-O-methylcytidine-3'-phosphate
  modified_base 21: mod_base = OTHER; note = 2'-O-methyluridine-3'-phosphate N-[tris(GalNAc-alkyl)-amidodecanoyl)]-4-hydroxyprolinol (Hyp-(GalNAc-alkyl)3)
accttttcttctaatgagtct

SEQ ID NO: 3234 - RNA, 21 nt, synthetic construct
  source 1..21: mol_type = other RNA
  modified_base 1: mod_base = OTHER; note = 2'-O-methylcytidine-3'-phosphorothioate
  modified_base 2: mod_base = OTHER; note = 2'-O-methylcytidine-3'-phosphorothioate
  modified_base 3: mod_base = OTHER; note = 2'-O-methylguanosine-3'-phosphate
  modified_base 4: mod_base = OTHER; note = 2'-O-methyluridine-3'-phosphate
  modified_base 5: mod_base = OTHER; note = 2'-O-methyluridine-3'-phosphate
  modified_base 6: mod_base = OTHER; note = 2'-O-methyluridine-3'-phosphate
  modified_base 7: mod_base = OTHER; note = 2'-fluorocytidine-3'-phosphate
  modified_base 8: mod_base = OTHER; note = 2'-O-methyluridine-3'-phosphate
  modified_base 9: mod_base = OTHER; note = 2'-fluorocytidine-3'-phosphate
  modified_base 10: mod_base = OTHER; note = 2'-fluorocytidine-3'-phosphate
  modified_base 11: mod_base = OTHER; note = 2'-fluorouridine-3'-phosphate
  modified_base 12: mod_base = OTHER; note = 2'-O-methyluridine-3'-phosphate
  modified_base 13: mod_base = OTHER; note = 2'-O-methylguanosine-3'-phosphate
  modified_base 14: mod_base = OTHER; note = 2'-O-methylguanosine-3'-phosphate
  modified_base 15: mod_base = OTHER; note = 2'-O-methyluridine-3'-phosphate
  modified_base 16: mod_base = OTHER; note = 2'-O-methylcytidine-3'-phosphate
  modified_base 17: mod_base = OTHER; note = 2'-O-methyluridine-3'-phosphate
  modified_base 18: mod_base = OTHER; note = 2'-O-methyladenosine-3'-phosphate
  modified_base 19: mod_base = OTHER; note = 2'-O-methyladenosine-3'-phosphate
  modified_base 20: mod_base = OTHER; note = 2'-O-methylguanosine-3'-phosphate
  modified_base 21: mod_base = OTHER; note = 2'-O-methyluridine-3'-phosphate N-[tris(GalNAc-alkyl)-amidodecanoyl)]-4-hydroxyprolinol (Hyp-(GalNAc-alkyl)3)
ccgtttctccttggtctaagt

SEQ ID NO: 3235 - RNA, 21 nt, synthetic construct
  source 1..21: mol_type = other RNA
  modified_base 1: mod_base = OTHER; note = 2'-O-methylcytidine-3'-phosphorothioate
  modified_base 2: mod_base = OTHER; note = 2'-O-methyluridine-3'-phosphorothioate
  modified_base 3: mod_base = OTHER; note = 2'-O-methylguanosine-3'-phosphate
  modified_base 4: mod_base = OTHER; note = 2'-O-methylguanosine-3'-phosphate
  modified_base 5: mod_base = OTHER; note = 2'-O-methylguanosine-3'-phosphate
  modified_base 6: mod_base = OTHER; note = 2'-O-methyluridine-3'-phosphate
  modified_base 7: mod_base = OTHER; note = 2'-fluorouridine-3'-phosphate
  modified_base 8: mod_base = OTHER; note = 2'-O-methyluridine-3'-phosphate
  modified_base 9: mod_base = OTHER; note = 2'-fluoroadenosine-3'-phosphate
  modified_base 10: mod_base = OTHER; note = 2'-fluorouridine-3'-phosphate
  modified_base 11: mod_base = OTHER; note = 2'-fluorouridine-3'-phosphate
  modified_base 12: mod_base = OTHER; note = 2'-O-methyluridine-3'-phosphate
  modified_base 13: mod_base = OTHER; note = 2'-O-methyluridine-3'-phosphate
  modified_base 14: mod_base = OTHER; note = 2'-O-methyladenosine-3'-phosphate
  modified_base 15: mod_base = OTHER; note = 2'-O-methylguanosine-3'-phosphate
  modified_base 16: mod_base = OTHER; note = 2'-O-methyladenosine-3'-phosphate
  modified_base 17: mod_base = OTHER; note = 2'-O-methylguanosine-3'-phosphate
  modified_base 18: mod_base = OTHER; note = 2'-O-methyladenosine-3'-phosphate
  modified_base 19: mod_base = OTHER; note = 2'-O-methyladenosine-3'-phosphate
  modified_base 20: mod_base = OTHER; note = 2'-O-methyluridine-3'-phosphate
  modified_base 21: mod_base = OTHER; note = 2'-O-methyluridine-3'-phosphate N-[tris(GalNAc-alkyl)-amidodecanoyl)]-4-hydroxyprolinol (Hyp-(GalNAc-alkyl)3)
ctgggtttattttagagaatt

SEQ ID NO: 3236 - RNA, 21 nt, synthetic construct
  source 1..21: mol_type = other RNA
  modified_base 1: mod_base = OTHER; note = 2'-O-methyluridine-3'-phosphorothioate
  modified_base 2: mod_base = OTHER; note = 2'-O-methylguanosine-3'-phosphorothioate
  modified_base 3: mod_base = OTHER; note = 2'-O-methylguanosine-3'-phosphate
  modified_base 4: mod_base = OTHER; note = 2'-O-methylguanosine-3'-phosphate
  modified_base 5: mod_base = OTHER; note = 2'-O-methyluridine-3'-phosphate
  modified_base 6: mod_base = OTHER; note = 2'-O-methyluridine-3'-phosphate
  modified_base 7: mod_base = OTHER; note = 2'-fluorouridine-3'-phosphate
  modified_base 8: mod_base = OTHER; note = 2'-O-methyladenosine-3'-phosphate
  modified_base 9: mod_base = OTHER; note = 2'-fluorouridine-3'-phosphate
  modified_base 10: mod_base = OTHER; note = 2'-fluorouridine-3'-phosphate
  modified_base 11: mod_base = OTHER; note = 2'-fluorouridine-3'-phosphate
  modified_base 12: mod_base = OTHER; note = 2'-O-methyluridine-3'-phosphate
  modified_base 13: mod_base = OTHER; note = 2'-O-methyladenosine-3'-phosphate
  modified_base 14: mod_base = OTHER; note = 2'-O-methylguanosine-3'-phosphate
  modified_base 15: mod_base = OTHER; note = 2'-O-methyladenosine-3'-phosphate
  modified_base 16: mod_base = OTHER; note = 2'-O-methylguanosine-3'-phosphate
  modified_base 17: mod_base = OTHER; note = 2'-O-methyladenosine-3'-phosphate
  modified_base 18: mod_base = OTHER; note = 2'-O-methyladenosine-3'-phosphate
  modified_base 19: mod_base = OTHER; note = 2'-O-methyluridine-3'-phosphate
  modified_base 20: mod_base = OTHER; note = 2'-O-methylguanosine-3'-phosphate
  modified_base 21: mod_base = OTHER; note = 2'-O-methyluridine-3'-phosphate N-[tris(GalNAc-alkyl)-amidodecanoyl)]-4-hydroxyprolinol (Hyp-(GalNAc-alkyl)3)
tgggtttattttagagaatgt

SEQ ID NO: 3237 - RNA, 21 nt, synthetic construct
  source 1..21: mol_type = other RNA
  modified_base 1: mod_base = OTHER; note = 2'-O-methylguanosine-3'-phosphorothioate
  modified_base 2: mod_base = OTHER; note = 2'-O-methyladenosine-3'-phosphorothioate
  modified_base 3: mod_base = OTHER; note = 2'-O-methylguanosine-3'-phosphate
  modified_base 4: mod_base = OTHER; note = 2'-O-methylguanosine-3'-phosphate
  modified_base 5: mod_base = OTHER; note = 2'-O-methylcytidine-3'-phosphate
  modified_base 6: mod_base = OTHER; note = 2'-O-methyladenosine-3'-phosphate
  modified_base 7: mod_base = OTHER; note = 2'-fluoroadenosine-3'-phosphate
  modified_base 8: mod_base = OTHER; note = 2'-O-methylguanosine-3'-phosphate
  modified_base 9: mod_base = OTHER; note = 2'-fluoroadenosine-3'-phosphate
  modified_base 10: mod_base = OTHER; note = 2'-fluoroadenosine-3'-phosphate
  modified_base 11: mod_base = OTHER; note = 2'-fluorocytidine-3'-phosphate
  modified_base 12: mod_base = OTHER; note = 2'-O-methylcytidine-3'-phosphate
  modified_base 13: mod_base = OTHER; note = 2'-O-methyladenosine-3'-phosphate
  modified_base 14: mod_base = OTHER; note = 2'-O-methylguanosine-3'-phosphate
  modified_base 15: mod_base = OTHER; note = 2'-O-methyluridine-3'-phosphate
  modified_base 16: mod_base = OTHER; note = 2'-O-methylguanosine-3'-phosphate
  modified_base 17: mod_base = OTHER; note = 2'-O-methyluridine-3'-phosphate
  modified_base 18: mod_base = OTHER; note = 2'-O-methyluridine-3'-phosphate
  modified_base 19: mod_base = OTHER; note = 2'-O-methyluridine-3'-phosphate
  modified_base 20: mod_base = OTHER; note = 2'-O-methyladenosine-3'-phosphate
  modified_base 21: mod_base = OTHER; note = 2'-O-methyluridine-3'-phosphate N-[tris(GalNAc-alkyl)-amidodecanoyl)]-4-hydroxyprolinol (Hyp-(GalNAc-alkyl)3)
gaggcaagaaccagtgtttat

SEQ ID NO: 3238 - RNA, 21 nt, synthetic construct
  source 1..21: mol_type = other RNA
  modified_base 1: mod_base = OTHER; note = 2'-O-methylguanosine-3'-phosphorothioate
  modified_base 2: mod_base = OTHER; note = 2'-O-methylcytidine-3'-phosphorothioate
  modified_base 3: mod_base = OTHER; note = 2'-O-methyladenosine-3'-phosphate
  modified_base 4: mod_base = OTHER; note = 2'-O-methyladenosine-3'-phosphate
  modified_base 5: mod_base = OTHER; note = 2'-O-methylguanosine-3'-phosphate
  modified_base 6: mod_base = OTHER; note = 2'-O-methyladenosine-3'-phosphate
  modified_base 7: mod_base = OTHER; note = 2'-fluoroadenosine-3'-phosphate
  modified_base 8: mod_base = OTHER; note = 2'-O-methylcytidine-3'-phosphate
  modified_base 9: mod_base = OTHER; note = 2'-fluorocytidine-3'-phosphate
  modified_base 10: mod_base = OTHER; note = 2'-fluoroadenosine-3'-phosphate
  modified_base 11: mod_base = OTHER; note = 2'-fluoroguanosine-3'-phosphate
  modified_base 12: mod_base = OTHER; note = 2'-O-methyluridine-3'-phosphate
  modified_base 13: mod_base = OTHER; note = 2'-O-methylguanosine-3'-phosphate
  modified_base 14: mod_base = OTHER; note = 2'-O-methyluridine-3'-phosphate
  modified_base 15: mod_base = OTHER; note = 2'-O-methyluridine-3'-phosphate
  modified_base 16: mod_base = OTHER; note = 2'-O-methyluridine-3'-phosphate
  modified_base 17: mod_base = OTHER; note = 2'-O-methyladenosine-3'-phosphate
  modified_base 18: mod_base = OTHER; note = 2'-O-methylguanosine-3'-phosphate
  modified_base 19: mod_base = OTHER; note = 2'-O-methylcytidine-3'-phosphate
  modified_base 20: mod_base = OTHER; note = 2'-O-methylguanosine-3'-phosphate
  modified_base 21: mod_base = OTHER; note = 2'-O-methyluridine-3'-phosphate N-[tris(GalNAc-alkyl)-amidodecanoyl)]-4-hydroxyprolinol (Hyp-(GalNAc-alkyl)3)
gcaagaaccagtgtttagcgt

SEQ ID NO: 3239 - RNA, 21 nt, synthetic construct
  source 1..21: mol_type = other RNA
  modified_base 1: mod_base = OTHER; note = 2'-O-methylcytidine-3'-phosphorothioate
  modified_base 2: mod_base = OTHER; note = 2'-O-methyladenosine-3'-phosphorothioate
  modified_base 3: mod_base = OTHER; note = 2'-O-methyladenosine-3'-phosphate
  modified_base 4: mod_base = OTHER; note = 2'-O-methylguanosine-3'-phosphate
  modified_base 5: mod_base = OTHER; note = 2'-O-methyladenosine-3'-phosphate
  modified_base 6: mod_base = OTHER; note = 2'-O-methyladenosine-3'-phosphate
  modified_base 7: mod_base = OTHER; note = 2'-fluorocytidine-3'-phosphate
  modified_base 8: mod_base = OTHER; note = 2'-O-methylcytidine-3'-phosphate
  modified_base 9: mod_base = OTHER; note = 2'-fluoroadenosine-3'-phosphate
  modified_base 10: mod_base = OTHER; note = 2'-fluoroguanosine-3'-phosphate
  modified_base 11: mod_base = OTHER; note = 2'-fluorouridine-3'-phosphate
  modified_base 12: mod_base = OTHER; note = 2'-O-methylguanosine-3'-phosphate
  modified_base 13: mod_base = OTHER; note = 2'-O-methyluridine-3'-phosphate
  modified_base 14: mod_base = OTHER; note = 2'-O-methyluridine-3'-phosphate
  modified_base 15: mod_base = OTHER; note = 2'-O-methyluridine-3'-phosphate
  modified_base 16: mod_base = OTHER; note = 2'-O-methyladenosine-3'-phosphate
  modified_base 17: mod_base = OTHER; note = 2'-O-methylguanosine-3'-phosphate
  modified_base 18: mod_base = OTHER; note = 2'-O-methylcytidine-3'-phosphate
  modified_base 19: mod_base = OTHER; note = 2'-O-methylguanosine-3'-phosphate
  modified_base 20: mod_base = OTHER; note = 2'-O-methylcytidine-3'-phosphate
  modified_base 21: mod_base = OTHER; note = 2'-O-methyluridine-3'-phosphate N-[tris(GalNAc-alkyl)-amidodecanoyl)]-4-hydroxyprolinol (Hyp-(GalNAc-alkyl)3)
caagaaccagtgtttagcgct

SEQ ID NO: 3240 - RNA, 21 nt, synthetic construct
  source 1..21: mol_type = other RNA
  modified_base 1: mod_base = OTHER; note = 2'-O-methyladenosine-3'-phosphorothioate
  modified_base 2: mod_base = OTHER; note = 2'-O-methyladenosine-3'-phosphorothioate
  modified_base 3: mod_base = OTHER; note = 2'-O-methylguanosine-3'-phosphate
  modified_base 4: mod_base = OTHER; note = 2'-O-methyladenosine-3'-phosphate
  modified_base 5: mod_base = OTHER; note = 2'-O-methyladenosine-3'-phosphate
  modified_base 6: mod_base = OTHER; note = 2'-O-methylcytidine-3'-phosphate
  modified_base 7: mod_base = OTHER; note = 2'-fluorocytidine-3'-phosphate
  modified_base 8: mod_base = OTHER; note = 2'-O-methyladenosine-3'-phosphate
  modified_base 9: mod_base = OTHER; note = 2'-fluoroguanosine-3'-phosphate
  modified_base 10: mod_base = OTHER; note = 2'-fluorouridine-3'-phosphate
  modified_base 11: mod_base = OTHER; note = 2'-fluoroguanosine-3'-phosphate
  modified_base 12: mod_base = OTHER; note = 2'-O-methyluridine-3'-phosphate
  modified_base 13: mod_base = OTHER; note = 2'-O-methyluridine-3'-phosphate
  modified_base 14: mod_base = OTHER; note = 2'-O-methyluridine-3'-phosphate
  modified_base 15: mod_base = OTHER; note = 2'-O-methyladenosine-3'-phosphate
  modified_base 16: mod_base = OTHER; note = 2'-O-methylguanosine-3'-phosphate
  modified_base 17: mod_base = OTHER; note = 2'-O-methylcytidine-3'-phosphate
  modified_base 18: mod_base = OTHER; note = 2'-O-methylguanosine-3'-phosphate
  modified_base 19: mod_base = OTHER; note = 2'-O-methylcytidine-3'-phosphate
  modified_base 20: mod_base = OTHER; note = 2'-O-methylguanosine-3'-phosphate
  modified_base 21: mod_base = OTHER; note = 2'-O-methyluridine-3'-phosphate N-[tris(GalNAc-alkyl)-amidodecanoyl)]-4-hydroxyprolinol (Hyp-(GalNAc-alkyl)3)
aagaaccagtgtttagcgcgt

SEQ ID NO: 3241 - RNA, 21 nt, synthetic construct
  source 1..21: mol_type = other RNA
  modified_base 1: mod_base = OTHER; note = 2'-O-methyladenosine-3'-phosphorothioate
  modified_base 2: mod_base = OTHER; note = 2'-O-methylguanosine-3'-phosphorothioate
  modified_base 3: mod_base = OTHER; note = 2'-O-methyladenosine-3'-phosphate
  modified_base 4: mod_base = OTHER; note = 2'-O-methyladenosine-3'-phosphate
  modified_base 5: mod_base = OTHER; note = 2'-O-methylcytidine-3'-phosphate
  modified_base 6: mod_base = OTHER; note = 2'-O-methylcytidine-3'-phosphate
  modified_base 7: mod_base = OTHER; note = 2'-fluoroadenosine-3'-phosphate
  modified_base 8: mod_base = OTHER; note = 2'-O-methylguanosine-3'-phosphate
  modified_base 9: mod_base = OTHER; note = 2'-fluorouridine-3'-phosphate
  modified_base 10: mod_base = OTHER; note = 2'-fluoroguanosine-3'-phosphate
  modified_base 11: mod_base = OTHER; note = 2'-fluorouridine-3'-phosphate
  modified_base 12: mod_base = OTHER; note = 2'-O-methyluridine-3'-phosphate
  modified_base 13: mod_base = OTHER; note = 2'-O-methyluridine-3'-phosphate
  modified_base 14: mod_base = OTHER; note = 2'-O-methyladenosine-3'-phosphate
  modified_base 15: mod_base = OTHER; note = 2'-O-methylguanosine-3'-phosphate
  modified_base 16: mod_base = OTHER; note = 2'-O-methylcytidine-3'-phosphate
  modified_base 17: mod_base = OTHER; note = 2'-O-methylguanosine-3'-phosphate
  modified_base 18: mod_base = OTHER; note = 2'-O-methylcytidine-3'-phosphate
  modified_base 19: mod_base = OTHER; note = 2'-O-methylguanosine-3'-phosphate
  modified_base 20: mod_base = OTHER; note = 2'-O-methylguanosine-3'-phosphate
  modified_base 21: mod_base = OTHER; note = 2'-O-methyluridine-3'-phosphate N-[tris(GalNAc-alkyl)-amidodecanoyl)]-4-hydroxyprolinol (Hyp-(GalNAc-alkyl)3)
agaaccagtgtttagcgcggt

SEQ ID NO: 3242 - RNA, 21 nt, synthetic construct
  source 1..21: mol_type = other RNA
  modified_base 1: mod_base = OTHER; note = 2'-O-methylguanosine-3'-phosphorothioate
  modified_base 2: mod_base = OTHER; note = 2'-O-methyladenosine-3'-phosphorothioate
  modified_base 3: mod_base = OTHER; note = 2'-O-methyladenosine-3'-phosphate
  modified_base 4: mod_base = OTHER; note = 2'-O-methylcytidine-3'-phosphate
  modified_base 5: mod_base = OTHER; note = 2'-O-methylcytidine-3'-phosphate
  modified_base 6: mod_base = OTHER; note = 2'-O-methyladenosine-3'-phosphate
  modified_base 7: mod_base = OTHER; note = 2'-fluoroguanosine-3'-phosphate
  modified_base 8: mod_base = OTHER; note = 2'-O-methyluridine-3'-phosphate
  modified_base 9: mod_base = OTHER; note = 2'-fluoroguanosine-3'-phosphate
  modified_base 10: mod_base = OTHER; note = 2'-fluorouridine-3'-phosphate
  modified_base 11: mod_base = OTHER; note = 2'-fluorouridine-3'-phosphate
  modified_base 12: mod_base = OTHER; note = 2'-O-methyluridine-3'-phosphate
  modified_base 13: mod_base = OTHER; note = 2'-O-methyladenosine-3'-phosphate
  modified_base 14: mod_base = OTHER; note = 2'-O-methylguanosine-3'-phosphate
  modified_base 15: mod_base = OTHER; note = 2'-O-methylcytidine-3'-phosphate
  modified_base 16: mod_base = OTHER; note = 2'-O-methylguanosine-3'-phosphate
  modified_base 17: mod_base = OTHER; note = 2'-O-methylcytidine-3'-phosphate
  modified_base 18: mod_base = OTHER; note = 2'-O-methylguanosine-3'-phosphate
  modified_base 19: mod_base = OTHER; note = 2'-O-methylguanosine-3'-phosphate
  modified_base 20: mod_base = OTHER; note = 2'-O-methylguanosine-3'-phosphate
  modified_base 21: mod_base = OTHER; note = 2'-O-methyluridine-3'-phosphate N-[tris(GalNAc-alkyl)-amidodecanoyl)]-4-hydroxyprolinol (Hyp-(GalNAc-alkyl)3)
gaaccagtgtttagcgcgggt

SEQ ID NO: 3243 - RNA, 21 nt, synthetic construct
  source 1..21: mol_type = other RNA
  modified_base 1: mod_base = OTHER; note = 2'-O-methyladenosine-3'-phosphorothioate
  modified_base 2: mod_base = OTHER; note = 2'-O-methyladenosine-3'-phosphorothioate
  modified_base 3: mod_base = OTHER; note = 2'-O-methylcytidine-3'-phosphate
  modified_base 4: mod_base = OTHER; note = 2'-O-methylcytidine-3'-phosphate
  modified_base 5: mod_base = OTHER; note = 2'-O-methyladenosine-3'-phosphate
  modified_base 6: mod_base = OTHER; note = 2'-O-methylguanosine-3'-phosphate
  modified_base 7: mod_base = OTHER; note = 2'-fluorouridine-3'-phosphate
  modified_base 8: mod_base = OTHER; note = 2'-O-methylguanosine-3'-phosphate
  modified_base 9: mod_base = OTHER; note = 2'-fluorouridine-3'-phosphate
  modified_base 10: mod_base = OTHER; note = 2'-fluorouridine-3'-phosphate
  modified_base 11: mod_base = OTHER; note = 2'-fluorouridine-3'-phosphate
  modified_base 12: mod_base = OTHER; note = 2'-O-methyladenosine-3'-phosphate
  modified_base 13: mod_base = OTHER; note = 2'-O-methylguanosine-3'-phosphate
  modified_base 14: mod_base = OTHER; note = 2'-O-methylcytidine-3'-phosphate
  modified_base 15: mod_base = OTHER; note = 2'-O-methylguanosine-3'-phosphate
  modified_base 16: mod_base = OTHER; note = 2'-O-methylcytidine-3'-phosphate
  modified_base 17: mod_base = OTHER; note = 2'-O-methylguanosine-3'-phosphate
  modified_base 18: mod_base = OTHER; note = 2'-O-methylguanosine-3'-phosphate
  modified_base 19: mod_base = OTHER; note = 2'-O-methylguanosine-3'-phosphate
  modified_base 20: mod_base = OTHER; note = 2'-O-methyladenosine-3'-phosphate
  modified_base 21: mod_base = OTHER; note = 2'-O-methyluridine-3'-phosphate N-[tris(GalNAc-alkyl)-amidodecanoyl)]-4-hydroxyprolinol (Hyp-(GalNAc-alkyl)3)
aaccagtgtttagcgcgggat

SEQ ID NO: 3244 - RNA, 21 nt, synthetic construct
  source 1..21: mol_type = other RNA
  modified_base 1: mod_base = OTHER; note = 2'-O-methylguanosine-3'-phosphorothioate
  modified_base 2: mod_base = OTHER; note = 2'-O-methyluridine-3'-phosphorothioate
  modified_base 3: mod_base = OTHER; note = 2'-O-methyluridine-3'-phosphate
  modified_base 4: mod_base = OTHER; note = 2'-O-methylcytidine-3'-phosphate
  modified_base 5: mod_base = OTHER; note = 2'-O-methylcytidine-3'-phosphate
  modified_base 6: mod_base = OTHER; note = 2'-O-methyladenosine-3'-phosphate
  modified_base 7: mod_base = OTHER; note = 2'-fluoroadenosine-3'-phosphate
  modified_base 8: mod_base = OTHER; note = 2'-O-methyladenosine-3'-phosphate
  modified_base 9: mod_base = OTHER; note = 2'-fluoroadenosine-3'-phosphate
  modified_base 10: mod_base = OTHER; note = 2'-fluoroadenosine-3'-phosphate
  modified_base 11: mod_base = OTHER; note = 2'-fluoroguanosine-3'-phosphate
  modified_base 12: mod_base = OTHER; note = 2'-O-methyladenosine-3'-phosphate
  modified_base 13: mod_base = OTHER; note = 2'-O-methyladenosine-3'-phosphate
  modified_base 14: mod_base = OTHER; note = 2'-O-methyluridine-3'-phosphate
  modified_base 15: mod_base = OTHER; note = 2'-O-methyluridine-3'-phosphate
  modified_base 16: mod_base = OTHER; note = 2'-O-methylcytidine-3'-phosphate
  modified_base 17: mod_base = OTHER; note = 2'-O-methylcytidine-3'-phosphate
  modified_base 18: mod_base = OTHER; note = 2'-O-methyladenosine-3'-phosphate
  modified_base 19: mod_base = OTHER; note = 2'-O-methyladenosine-3'-phosphate
  modified_base 20: mod_base = OTHER; note = 2'-O-methylcytidine-3'-phosphate
  modified_base 21: mod_base = OTHER; note = 2'-O-methyluridine-3'-phosphate N-[tris(GalNAc-alkyl)-amidodecanoyl)]-4-hydroxyprolinol (Hyp-(GalNAc-alkyl)3)
gttccaaaaagaattccaact

SEQ ID NO: 3245 - RNA, 21 nt, synthetic construct
  source 1..21: mol_type = other RNA
  modified_base 1: mod_base = OTHER; note = 2'-O-methyluridine-3'-phosphorothioate
  modified_base 2: mod_base = OTHER; note = 2'-O-methylcytidine-3'-phosphorothioate
  modified_base 3: mod_base = OTHER; note = 2'-O-methylcytidine-3'-phosphate
  modified_base 4: mod_base = OTHER; note = 2'-O-methyladenosine-3'-phosphate
  modified_base 5: mod_base = OTHER; note = 2'-O-methyladenosine-3'-phosphate
  modified_base 6: mod_base = OTHER; note = 2'-O-methyladenosine-3'-phosphate
  modified_base 7: mod_base = OTHER; note = 2'-fluoroadenosine-3'-phosphate
  modified_base 8: mod_base = OTHER; note = 2'-O-methyladenosine-3'-phosphate
  modified_base 9: mod_base = OTHER; note = 2'-fluoroguanosine-3'-phosphate
  modified_base 10: mod_base = OTHER; note = 2'-fluoroadenosine-3'-phosphate
  modified_base 11: mod_base = OTHER; note = 2'-fluoroadenosine-3'-phosphate
  modified_base 12: mod_base = OTHER; note = 2'-O-methyluridine-3'-phosphate
  modified_base 13: mod_base = OTHER; note = 2'-O-methyluridine-3'-phosphate
  modified_base 14: mod_base = OTHER; note = 2'-O-methylcytidine-3'-phosphate
  modified_base 15: mod_base = OTHER; note = 2'-O-methylcytidine-3'-phosphate
  modified_base 16: mod_base = OTHER; note = 2'-O-methyladenosine-3'-phosphate
  modified_base 17: mod_base = OTHER; note = 2'-O-methyladenosine-3'-phosphate
  modified_base 18: mod_base = OTHER; note = 2'-O-methylcytidine-3'-phosphate
  modified_base 19: mod_base = OTHER; note = 2'-O-methylcytidine-3'-phosphate
  modified_base 20: mod_base = OTHER; note = 2'-O-methylguanosine-3'-phosphate
  modified_base 21: mod_base = OTHER; note = 2'-O-methyluridine-3'-phosphate N-[tris(GalNAc-alkyl)-amidodecanoyl)]-4-hydroxyprolinol (Hyp-(GalNAc-alkyl)3)
tccaaaaagaattccaaccgt

SEQ ID NO: 3246 - RNA, 21 nt, synthetic construct
  source 1..21: mol_type = other RNA
  modified_base 1: mod_base = OTHER; note = 2'-O-methylcytidine-3'-phosphorothioate
  modified_base 2: mod_base = OTHER; note = 2'-O-methylcytidine-3'-phosphorothioate
  modified_base 3: mod_base = OTHER; note = 2'-O-methyladenosine-3'-phosphate
  modified_base 4: mod_base = OTHER; note = 2'-O-methyladenosine-3'-phosphate
  modified_base 5: mod_base = OTHER; note = 2'-O-methyladenosine-3'-phosphate
  modified_base 6: mod_base = OTHER; note = 2'-O-methyladenosine-3'-phosphate
  modified_base 7: mod_base = OTHER; note = 2'-fluoroadenosine-3'-phosphate
  modified_base 8: mod_base = OTHER; note = 2'-O-methylguanosine-3'-phosphate
  modified_base 9: mod_base = OTHER; note = 2'-fluoroadenosine-3'-phosphate
  modified_base 10: mod_base = OTHER; note = 2'-fluoroadenosine-3'-phosphate
  modified_base 11: mod_base = OTHER; note = 2'-fluorouridine-3'-phosphate
  modified_base 12: mod_base = OTHER; note = 2'-O-methyluridine-3'-phosphate
  modified_base 13: mod_base = OTHER; note = 2'-O-methylcytidine-3'-phosphate
  modified_base 14: mod_base = OTHER; note = 2'-O-methylcytidine-3'-phosphate
  modified_base 15: mod_base = OTHER; note = 2'-O-methyladenosine-3'-phosphate
  modified_base 16: mod_base = OTHER; note = 2'-O-methyladenosine-3'-phosphate
  modified_base 17: mod_base = OTHER; note = 2'-O-methylcytidine-3'-phosphate
  modified_base 18: mod_base = OTHER; note = 2'-O-methylcytidine-3'-phosphate
  modified_base 19: mod_base = OTHER; note = 2'-O-methylguanosine-3'-phosphate
  modified_base 20: mod_base = OTHER; note = 2'-O-methyladenosine-3'-phosphate
  modified_base 21: mod_base = OTHER; note = 2'-O-methyluridine-3'-phosphate N-[tris(GalNAc-alkyl)-amidodecanoyl)]-4-hydroxyprolinol (Hyp-(GalNAc-alkyl)3)
ccaaaaagaattccaaccgat

SEQ ID NO: 3247 - RNA, 21 nt, synthetic construct
  source 1..21: mol_type = other RNA
  modified_base 1: mod_base = OTHER; note = 2'-O-methyladenosine-3'-phosphorothioate
  modified_base 2: mod_base = OTHER; note = 2'-O-methyladenosine-3'-phosphorothioate
  modified_base 3: mod_base = OTHER; note = 2'-O-methyladenosine-3'-phosphate
  modified_base 4: mod_base = OTHER; note = 2'-O-methyladenosine-3'-phosphate
  modified_base 5: mod_base = OTHER; note = 2'-O-methyladenosine-3'-phosphate
  modified_base 6: mod_base = OTHER; note = 2'-O-methylguanosine-3'-phosphate
  modified_base 7: mod_base = OTHER; note = 2'-fluoroadenosine-3'-phosphate
  modified_base 8: mod_base = OTHER; note = 2'-O-methyladenosine-3'-phosphate
  modified_base 9: mod_base = OTHER; note = 2'-fluorouridine-3'-phosphate
  modified_base 10: mod_base = OTHER; note = 2'-fluorouridine-3'-phosphate
  modified_base 11: mod_base = OTHER; note = 2'-fluorocytidine-3'-phosphate
  modified_base 12: mod_base = OTHER; note = 2'-O-methylcytidine-3'-phosphate
  modified_base 13: mod_base = OTHER; note = 2'-O-methyladenosine-3'-phosphate
  modified_base 14: mod_base = OTHER; note = 2'-O-methyladenosine-3'-phosphate
  modified_base 15: mod_base = OTHER; note = 2'-O-methylcytidine-3'-phosphate
  modified_base 16: mod_base = OTHER; note = 2'-O-methylcytidine-3'-phosphate
  modified_base 17: mod_base = OTHER; note = 2'-O-methylguanosine-3'-phosphate
  modified_base 18: mod_base = OTHER; note = 2'-O-methyladenosine-3'-phosphate
  modified_base 19: mod_base = OTHER; note = 2'-O-methylcytidine-3'-phosphate
  modified_base 20: mod_base = OTHER; note = 2'-O-methylcytidine-3'-phosphate
  modified_base 21: mod_base = OTHER; note = 2'-O-methyluridine-3'-phosphate N-[tris(GalNAc-alkyl)-amidodecanoyl)]-4-hydroxyprolinol (Hyp-(GalNAc-alkyl)3)
aaaaagaattccaaccgacct

SEQ ID NO: 3248 - RNA, 21 nt, synthetic construct
  source 1..21: mol_type = other RNA
  modified_base 1: mod_base = OTHER; note = 2'-O-methyladenosine-3'-phosphorothioate
  modified_base 2: mod_base = OTHER; note = 2'-O-methyladenosine-3'-phosphorothioate
  modified_base 3: mod_base = OTHER; note = 2'-O-methyladenosine-3'-phosphate
  modified_base 4: mod_base = OTHER; note = 2'-O-methyladenosine-3'-phosphate
  modified_base 5: mod_base = OTHER; note = 2'-O-methylguanosine-3'-phosphate
  modified_base 6: mod_base = OTHER; note = 2'-O-methyladenosine-3'-phosphate
  modified_base 7: mod_base = OTHER; note = 2'-fluoroadenosine-3'-phosphate
  modified_base 8: mod_base = OTHER; note = 2'-O-methyluridine-3'-phosphate
  modified_base 9: mod_base = OTHER; note = 2'-fluorouridine-3'-phosphate
  modified_base 10: mod_base = OTHER; note = 2'-fluorocytidine-3'-phosphate
  modified_base 11: mod_base = OTHER; note = 2'-fluorocytidine-3'-phosphate
  modified_base 12: mod_base = OTHER; note = 2'-O-methyladenosine-3'-phosphate
  modified_base 13: mod_base = OTHER; note = 2'-O-methyladenosine-3'-phosphate
  modified_base 14: mod_base = OTHER; note = 2'-O-methylcytidine-3'-phosphate
  modified_base 15: mod_base = OTHER; note = 2'-O-methylcytidine-3'-phosphate
  modified_base 16: mod_base = OTHER; note = 2'-O-methylguanosine-3'-phosphate
  modified_base 17: mod_base = OTHER; note = 2'-O-methyladenosine-3'-phosphate
  modified_base 18: mod_base = OTHER; note = 2'-O-methylcytidine-3'-phosphate
  modified_base 19: mod_base = OTHER; note = 2'-O-methylcytidine-3'-phosphate
  modified_base 20: mod_base = OTHER; note = 2'-O-methyladenosine-3'-phosphate
  modified_base 21: mod_base = OTHER; note = 2'-O-methyluridine-3'-phosphate N-[tris(GalNAc-alkyl)-amidodecanoyl)]-4-hydroxyprolinol (Hyp-(GalNAc-alkyl)3)
aaaagaattccaaccgaccat

SEQ ID NO: 3249 - RNA, 21 nt, synthetic construct
  source 1..21: mol_type = other RNA
  modified_base 1: mod_base = OTHER; note = 2'-O-methyladenosine-3'-phosphorothioate
  modified_base 2: mod_base = OTHER; note = 2'-O-methyladenosine-3'-phosphorothioate
  modified_base 3: mod_base = OTHER; note = 2'-O-methyladenosine-3'-phosphate
  modified_base 4: mod_base = OTHER; note = 2'-O-methylguanosine-3'-phosphate
  modified_base 5: mod_base = OTHER; note = 2'-O-methyladenosine-3'-phosphate
  modified_base 6: mod_base = OTHER; note = 2'-O-methyladenosine-3'-phosphate
  modified_base 7: mod_base = OTHER; note = 2'-fluorouridine-3'-phosphate
  modified_base 8: mod_base = OTHER; note = 2'-O-methyluridine-3'-phosphate
  modified_base 9: mod_base = OTHER; note = 2'-fluorocytidine-3'-phosphate
  modified_base 10: mod_base = OTHER; note = 2'-fluorocytidine-3'-phosphate
  modified_base 11: mod_base = OTHER; note = 2'-fluoroadenosine-3'-phosphate
  modified_base 12: mod_base = OTHER; note = 2'-O-methyladenosine-3'-phosphate
  modified_base 13: mod_base = OTHER; note = 2'-O-methylcytidine-3'-phosphate
  modified_base 14: mod_base = OTHER; note = 2'-O-methylcytidine-3'-phosphate
  modified_base 15: mod_base = OTHER; note = 2'-O-methylguanosine-3'-phosphate
  modified_base 16: mod_base = OTHER; note = 2'-O-methyladenosine-3'-phosphate
  modified_base 17: mod_base = OTHER; note = 2'-O-methylcytidine-3'-phosphate
  modified_base 18: mod_base = OTHER; note = 2'-O-methylcytidine-3'-phosphate
  modified_base 19: mod_base = OTHER; note = 2'-O-methyladenosine-3'-phosphate
  modified_base 20: mod_base = OTHER; note = 2'-O-methylguanosine-3'-phosphate
  modified_base 21: mod_base = OTHER; note = 2'-O-methyluridine-3'-phosphate N-[tris(GalNAc-alkyl)-amidodecanoyl)]-4-hydroxyprolinol (Hyp-(GalNAc-alkyl)3)
aaagaattccaaccgaccagt

SEQ ID NO: 3250 - RNA, 21 nt, synthetic construct
  source 1..21: mol_type = other RNA
  modified_base 1: mod_base = OTHER; note = 2'-O-methyladenosine-3'-phosphorothioate
  modified_base 2: mod_base = OTHER; note = 2'-O-methyladenosine-3'-phosphorothioate
  modified_base 3: mod_base = OTHER; note = 2'-O-methylguanosine-3'-phosphate
  modified_base 4: mod_base = OTHER; note = 2'-O-methyladenosine-3'-phosphate
  modified_base 5: mod_base = OTHER; note = 2'-O-methyladenosine-3'-phosphate
  modified_base 6: mod_base = OTHER; note = 2'-O-methyluridine-3'-phosphate
  modified_base 7: mod_base = OTHER; note = 2'-fluorouridine-3'-phosphate
  modified_base 8: mod_base = OTHER; note = 2'-O-methylcytidine-3'-phosphate
  modified_base 9: mod_base = OTHER; note = 2'-fluorocytidine-3'-phosphate
  modified_base 10: mod_base = OTHER; note = 2'-fluoroadenosine-3'-phosphate
  modified_base 11: mod_base = OTHER; note = 2'-fluoroadenosine-3'-phosphate
  modified_base 12: mod_base = OTHER; note = 2'-O-methylcytidine-3'-phosphate
  modified_base 13: mod_base = OTHER; note = 2'-O-methylcytidine-3'-phosphate
  modified_base 14: mod_base = OTHER; note = 2'-O-methylguanosine-3'-phosphate
  modified_base 15: mod_base = OTHER; note = 2'-O-methyladenosine-3'-phosphate
  modified_base 16: mod_base = OTHER; note = 2'-O-methylcytidine-3'-phosphate
  modified_base 17: mod_base = OTHER; note = 2'-O-methylcytidine-3'-phosphate
  modified_base 18: mod_base = OTHER; note = 2'-O-methyladenosine-3'-phosphate
  modified_base 19: mod_base = OTHER; note = 2'-O-methylguanosine-3'-phosphate
  modified_base 20: mod_base = OTHER; note = 2'-O-methylcytidine-3'-phosphate
  modified_base 21: mod_base = OTHER; note = 2'-O-methyluridine-3'-phosphate N-[tris(GalNAc-alkyl)-amidodecanoyl)]-4-hydroxyprolinol (Hyp-(GalNAc-alkyl)3)
aagaattccaaccgaccagct

SEQ ID NO: 3251 - RNA, 21 nt, synthetic construct
  source 1..21: mol_type = other RNA
  modified_base 1: mod_base = OTHER; note = 2'-O-methylguanosine-3'-phosphorothioate
  modified_base 2: mod_base = OTHER; note = 2'-O-methyladenosine-3'-phosphorothioate
  modified_base 3: mod_base = OTHER; note = 2'-O-methyladenosine-3'-phosphate
  modified_base 4: mod_base = OTHER; note = 2'-O-methyluridine-3'-phosphate
  modified_base 5: mod_base = OTHER; note = 2'-O-methyluridine-3'-phosphate
  modified_base 6: mod_base = OTHER; note = 2'-O-methylcytidine-3'-phosphate
  modified_base 7: mod_base = OTHER; note = 2'-fluorocytidine-3'-phosphate
  modified_base 8: mod_base = OTHER; note = 2'-O-methyladenosine-3'-phosphate
  modified_base 9: mod_base = OTHER; note = 2'-fluoroadenosine-3'-phosphate
  modified_base 10: mod_base = OTHER; note = 2'-fluorocytidine-3'-phosphate
  modified_base 11: mod_base = OTHER; note = 2'-fluorocytidine-3'-phosphate
  modified_base 12: mod_base = OTHER; note = 2'-O-methylguanosine-3'-phosphate
  modified_base 13: mod_base = OTHER; note = 2'-O-methyladenosine-3'-phosphate
  modified_base 14: mod_base = OTHER; note = 2'-O-methylcytidine-3'-phosphate
  modified_base 15: mod_base = OTHER; note = 2'-O-methylcytidine-3'-phosphate
  modified_base 16: mod_base = OTHER; note = 2'-O-methyladenosine-3'-phosphate
  modified_base 17: mod_base = OTHER; note = 2'-O-methylguanosine-3'-phosphate
  modified_base 18: mod_base = OTHER; note = 2'-O-methylcytidine-3'-phosphate
  modified_base 19: mod_base = OTHER; note = 2'-O-methyluridine-3'-phosphate
  modified_base 20: mod_base = OTHER; note = 2'-O-methyluridine-3'-phosphate
  modified_base 21: mod_base = OTHER; note = 2'-O-methyluridine-3'-phosphate N-[tris(GalNAc-alkyl)-amidodecanoyl)]-4-hydroxyprolinol (Hyp-(GalNAc-alkyl)3)
gaattccaaccgaccagcttt

SEQ ID NO: 3252 - RNA, 21 nt, synthetic construct
  source 1..21: mol_type = other RNA
  modified_base 1: mod_base = OTHER; note = 2'-O-methyladenosine-3'-phosphorothioate
  modified_base 2: mod_base = OTHER; note = 2'-O-methyladenosine-3'-phosphorothioate
  modified_base 3: mod_base = OTHER; note = 2'-O-methyluridine-3'-phosphate
  modified_base 4: mod_base = OTHER; note = 2'-O-methyluridine-3'-phosphate
  modified_base 5: mod_base = OTHER; note = 2'-O-methylcytidine-3'-phosphate
  modified_base 6: mod_base = OTHER; note = 2'-O-methylcytidine-3'-phosphate
  modified_base 7: mod_base = OTHER; note = 2'-fluoroadenosine-3'-phosphate
  modified_base 8: mod_base = OTHER; note = 2'-O-methyladenosine-3'-phosphate
  modified_base 9: mod_base = OTHER; note = 2'-fluorocytidine-3'-phosphate
  modified_base 10: mod_base = OTHER; note = 2'-fluorocytidine-3'-phosphate
  modified_base 11: mod_base = OTHER; note = 2'-fluoroguanosine-3'-phosphate
  modified_base 12: mod_base = OTHER; note = 2'-O-methyladenosine-3'-phosphate
  modified_base 13: mod_base = OTHER; note = 2'-O-methylcytidine-3'-phosphate
  modified_base 14: mod_base = OTHER; note = 2'-O-methylcytidine-3'-phosphate
  modified_base 15: mod_base = OTHER; note = 2'-O-methyladenosine-3'-phosphate
  modified_base 16: mod_base = OTHER; note = 2'-O-methylguanosine-3'-phosphate
  modified_base 17: mod_base = OTHER; note = 2'-O-methylcytidine-3'-phosphate
  modified_base 18: mod_base = OTHER; note = 2'-O-methyluridine-3'-phosphate
  modified_base 19: mod_base = OTHER; note = 2'-O-methyluridine-3'-phosphate
  modified_base 20: mod_base = OTHER; note = 2'-O-methylguanosine-3'-phosphate
  modified_base 21: mod_base = OTHER; note = 2'-O-methyluridine-3'-phosphate N-[tris(GalNAc-alkyl)-amidodecanoyl)]-4-hydroxyprolinol (Hyp-(GalNAc-alkyl)3)
aattccaaccgaccagcttgt

SEQ ID NO: 3253 - RNA, 21 nt, synthetic construct
  source 1..21: mol_type = other RNA
  modified_base 1: mod_base = OTHER; note = 2'-O-methyladenosine-3'-phosphorothioate
  modified_base 2: mod_base = OTHER; note = 2'-O-methyluridine-3'-phosphorothioate
  modified_base 3: mod_base = OTHER; note = 2'-O-methyluridine-3'-phosphate
  modified_base 4: mod_base = OTHER; note = 2'-O-methylcytidine-3'-phosphate
  modified_base 5: mod_base = OTHER; note = 2'-O-methylcytidine-3'-phosphate
  modified_base 6: mod_base = OTHER; note = 2'-O-methyladenosine-3'-phosphate
  modified_base 7: mod_base = OTHER; note = 2'-fluoroadenosine-3'-phosphate
  modified_base 8: mod_base = OTHER; note = 2'-O-methylcytidine-3'-phosphate
  modified_base 9: mod_base = OTHER; note = 2'-fluorocytidine-3'-phosphate
  modified_base 10: mod_base = OTHER; note = 2'-fluoroguanosine-3'-phosphate
  modified_base 11: mod_base = OTHER; note = 2'-fluoroadenosine-3'-phosphate
  modified_base 12: mod_base = OTHER; note = 2'-O-methylcytidine-3'-phosphate
  modified_base 13: mod_base = OTHER; note = 2'-O-methylcytidine-3'-phosphate
  modified_base 14: mod_base = OTHER; note = 2'-O-methyladenosine-3'-phosphate
  modified_base 15: mod_base = OTHER; note = 2'-O-methylguanosine-3'-phosphate
  modified_base 16: mod_base = OTHER; note = 2'-O-methylcytidine-3'-phosphate
  modified_base 17: mod_base = OTHER; note = 2'-O-methyluridine-3'-phosphate
  modified_base 18: mod_base = OTHER; note = 2'-O-methyluridine-3'-phosphate
  modified_base 19: mod_base = OTHER; note = 2'-O-methylguanosine-3'-phosphate
  modified_base 20: mod_base = OTHER; note = 2'-O-methyluridine-3'-phosphate
  modified_base 21: mod_base = OTHER; note = 2'-O-methyluridine-3'-phosphate N-[tris(GalNAc-alkyl)-amidodecanoyl)]-4-hydroxyprolinol (Hyp-(GalNAc-alkyl)3)
attccaaccgaccagcttgtt

SEQ ID NO: 3254 - RNA, 21 nt, synthetic construct
  source 1..21: mol_type = other RNA
  modified_base 1: mod_base = OTHER; note = 2'-O-methyluridine-3'-phosphorothioate
  modified_base 2: mod_base = OTHER; note = 2'-O-methylcytidine-3'-phosphorothioate
  modified_base 3: mod_base = OTHER; note = 2'-O-methylcytidine-3'-phosphate
  modified_base 4: mod_base = OTHER; note = 2'-O-methyladenosine-3'-phosphate
  modified_base 5: mod_base = OTHER; note = 2'-O-methyladenosine-3'-phosphate
  modified_base 6: mod_base = OTHER; note = 2'-O-methylcytidine-3'-phosphate
  modified_base 7: mod_base = OTHER; note = 2'-fluorocytidine-3'-phosphate
  modified_base 8: mod_base = OTHER; note = 2'-O-methylguanosine-3'-phosphate
  modified_base 9: mod_base = OTHER; note = 2'-fluoroadenosine-3'-phosphate
  modified_base 10: mod_base = OTHER; note = 2'-fluorocytidine-3'-phosphate
  modified_base 11: mod_base = OTHER; note = 2'-fluorocytidine-3'-phosphate
  modified_base 12: mod_base = OTHER; note = 2'-O-methyladenosine-3'-phosphate
  modified_base 13: mod_base = OTHER; note = 2'-O-methylguanosine-3'-phosphate
  modified_base 14: mod_base = OTHER; note = 2'-O-methylcytidine-3'-phosphate
  modified_base 15: mod_base = OTHER; note = 2'-O-methyluridine-3'-phosphate
  modified_base 16: mod_base = OTHER; note = 2'-O-methyluridine-3'-phosphate
  modified_base 17: mod_base = OTHER; note = 2'-O-methylguanosine-3'-phosphate
  modified_base 18: mod_base = OTHER; note = 2'-O-methyluridine-3'-phosphate
  modified_base 19: mod_base = OTHER; note = 2'-O-methyluridine-3'-phosphate
  modified_base 20: mod_base = OTHER; note = 2'-O-methyluridine-3'-phosphate
  modified_base 21: mod_base = OTHER; note = 2'-O-methyluridine-3'-phosphate N-[tris(GalNAc-alkyl)-amidodecanoyl)]-4-hydroxyprolinol (Hyp-(GalNAc-alkyl)3)
tccaaccgaccagcttgtttt

SEQ ID NO: 3255 - RNA, 21 nt, synthetic construct
  source 1..21: mol_type = other RNA
  modified_base 1: mod_base = OTHER; note = 2'-O-methylcytidine-3'-phosphorothioate
  modified_base 2: mod_base = OTHER; note = 2'-O-methylcytidine-3'-phosphorothioate
  modified_base 3: mod_base = OTHER; note = 2'-O-methyladenosine-3'-phosphate
  modified_base 4: mod_base = OTHER; note = 2'-O-methyladenosine-3'-phosphate
  modified_base 5: mod_base = OTHER; note = 2'-O-methylcytidine-3'-phosphate
  modified_base 6: mod_base = OTHER; note = 2'-O-methylcytidine-3'-phosphate
  modified_base 7: mod_base = OTHER; note = 2'-fluoroguanosine-3'-phosphate
  modified_base 8: mod_base = OTHER; note = 2'-O-methyladenosine-3'-phosphate
  modified_base 9: mod_base = OTHER; note = 2'-fluorocytidine-3'-phosphate
  modified_base 10: mod_base = OTHER; note = 2'-fluorocytidine-3'-phosphate
  modified_base 11: mod_base = OTHER; note = 2'-fluoroadenosine-3'-phosphate
  modified_base 12: mod_base = OTHER; note = 2'-O-methylguanosine-3'-phosphate
  modified_base 13: mod_base = OTHER; note = 2'-O-methylcytidine-3'-phosphate
  modified_base 14: mod_base = OTHER; note = 2'-O-methyluridine-3'-phosphate
  modified_base 15: mod_base = OTHER; note = 2'-O-methyluridine-3'-phosphate
  modified_base 16: mod_base = OTHER; note = 2'-O-methylguanosine-3'-phosphate
  modified_base 17: mod_base = OTHER; note = 2'-O-methyluridine-3'-phosphate
  modified_base 18: mod_base = OTHER; note = 2'-O-methyluridine-3'-phosphate
  modified_base 19: mod_base = OTHER; note = 2'-O-methyluridine-3'-phosphate
  modified_base 20: mod_base = OTHER; note = 2'-O-methylguanosine-3'-phosphate
  modified_base 21: mod_base = OTHER; note = 2'-O-methyluridine-3'-phosphate N-[tris(GalNAc-alkyl)-amidodecanoyl)]-4-hydroxyprolinol (Hyp-(GalNAc-alkyl)3)
ccaaccgaccagcttgtttgt

SEQ ID NO: 3256 - RNA, 21 nt, synthetic construct
  source 1..21: mol_type = other RNA
  modified_base 1: mod_base = OTHER; note = 2'-O-methylcytidine-3'-phosphorothioate
  modified_base 2: mod_base = OTHER; note = 2'-O-methyladenosine-3'-phosphorothioate
  modified_base 3: mod_base = OTHER; note = 2'-O-methyladenosine-3'-phosphate
  modified_base 4: mod_base = OTHER; note = 2'-O-methylcytidine-3'-phosphate
  modified_base 5: mod_base = OTHER; note = 2'-O-methylcytidine-3'-phosphate
  modified_base 6: mod_base = OTHER; note = 2'-O-methylguanosine-3'-phosphate
  modified_base 7: mod_base = OTHER; note = 2'-fluoroadenosine-3'-phosphate
  modified_base 8: mod_base = OTHER; note = 2'-O-methylcytidine-3'-phosphate
  modified_base 9: mod_base = OTHER; note = 2'-fluorocytidine-3'-phosphate
  modified_base 10: mod_base = OTHER; note = 2'-fluoroadenosine-3'-phosphate
  modified_base 11: mod_base = OTHER; note = 2'-fluoroguanosine-3'-phosphate
  modified_base 12: mod_base = OTHER; note = 2'-O-methylcytidine-3'-phosphate
  modified_base 13: mod_base = OTHER; note = 2'-O-methyluridine-3'-phosphate
  modified_base 14: mod_base = OTHER; note = 2'-O-methyluridine-3'-phosphate
  modified_base 15: mod_base = OTHER; note = 2'-O-methylguanosine-3'-phosphate
  modified_base 16: mod_base = OTHER; note = 2'-O-methyluridine-3'-phosphate
  modified_base 17: mod_base = OTHER; note = 2'-O-methyluridine-3'-phosphate
  modified_base 18: mod_base = OTHER; note = 2'-O-methyluridine-3'-phosphate
  modified_base 19: mod_base = OTHER; note = 2'-O-methylguanosine-3'-phosphate
  modified_base 20: mod_base = OTHER; note = 2'-O-methyluridine-3'-phosphate
  modified_base 21: mod_base = OTHER; note = 2'-O-methyluridine-3'-phosphate N-[tris(GalNAc-alkyl)-amidodecanoyl)]-4-hydroxyprolinol (Hyp-(GalNAc-alkyl)3)
caaccgaccagcttgtttgtt

SEQ ID NO: 3257 - RNA, 21 nt, synthetic construct
  source 1..21: mol_type = other RNA
  modified_base 1: mod_base = OTHER; note = 2'-O-methyladenosine-3'-phosphorothioate
  modified_base 2: mod_base = OTHER; note = 2'-O-methyladenosine-3'-phosphorothioate
  modified_base 3: mod_base = OTHER; note = 2'-O-methylcytidine-3'-phosphate
  modified_base 4: mod_base = OTHER; note = 2'-O-methylcytidine-3'-phosphate
  modified_base 5: mod_base = OTHER; note = 2'-O-methylguanosine-3'-phosphate
  modified_base 6: mod_base = OTHER; note = 2'-O-methyladenosine-3'-phosphate
  modified_base 7: mod_base = OTHER; note = 2'-fluorocytidine-3'-phosphate
  modified_base 8: mod_base = OTHER; note = 2'-O-methylcytidine-3'-phosphate
  modified_base 9: mod_base = OTHER; note = 2'-fluoroadenosine-3'-phosphate
  modified_base 10: mod_base = OTHER; note = 2'-fluoroguanosine-3'-phosphate
  modified_base 11: mod_base = OTHER; note = 2'-fluorocytidine-3'-phosphate
  modified_base 12: mod_base = OTHER; note = 2'-O-methyluridine-3'-phosphate
  modified_base 13: mod_base = OTHER; note = 2'-O-methyluridine-3'-phosphate
  modified_base 14: mod_base = OTHER; note = 2'-O-methylguanosine-3'-phosphate
  modified_base 15: mod_base = OTHER; note = 2'-O-methyluridine-3'-phosphate
  modified_base 16: mod_base = OTHER; note = 2'-O-methyluridine-3'-phosphate
  modified_base 17: mod_base = OTHER; note = 2'-O-methyluridine-3'-phosphate
  modified_base 18: mod_base = OTHER; note = 2'-O-methylguanosine-3'-phosphate
  modified_base 19: mod_base = OTHER; note = 2'-O-methyluridine-3'-phosphate
  modified_base 20: mod_base = OTHER; note = 2'-O-methylguanosine-3'-phosphate
  modified_base 21: mod_base = OTHER; note = 2'-O-methyluridine-3'-phosphate N-[tris(GalNAc-alkyl)-amidodecanoyl)]-4-hydroxyprolinol (Hyp-(GalNAc-alkyl)3)
aaccgaccagcttgtttgtgt

SEQ ID NO: 3258 - RNA, 21 nt, synthetic construct
  source 1..21: mol_type = other RNA
  modified_base 1: mod_base = OTHER; note = 2'-O-methylcytidine-3'-phosphorothioate
  modified_base 2: mod_base = OTHER; note = 2'-O-methylcytidine-3'-phosphorothioate
  modified_base 3: mod_base = OTHER; note = 2'-O-methylguanosine-3'-phosphate
  modified_base 4: mod_base = OTHER; note = 2'-O-methyladenosine-3'-phosphate
  modified_base 5: mod_base = OTHER; note = 2'-O-methylcytidine-3'-phosphate
  modified_base 6: mod_base = OTHER; note = 2'-O-methylcytidine-3'-phosphate
  modified_base 7: mod_base = OTHER; note = 2'-fluoroadenosine-3'-phosphate
  modified_base 8: mod_base = OTHER; note = 2'-O-methylguanosine-3'-phosphate
  modified_base 9: mod_base = OTHER; note = 2'-fluorocytidine-3'-phosphate
  modified_base 10: mod_base = OTHER; note = 2'-fluorouridine-3'-phosphate
  modified_base 11: mod_base = OTHER; note = 2'-fluorouridine-3'-phosphate
  modified_base 12: mod_base = OTHER; note = 2'-O-methylguanosine-3'-phosphate
  modified_base 13: mod_base = OTHER; note = 2'-O-methyluridine-3'-phosphate
  modified_base 14: mod_base = OTHER; note = 2'-O-methyluridine-3'-phosphate
  modified_base 15: mod_base = OTHER; note = 2'-O-methyluridine-3'-phosphate
  modified_base 16: mod_base = OTHER; note = 2'-O-methylguanosine-3'-phosphate
  modified_base 17: mod_base = OTHER; note = 2'-O-methyluridine-3'-phosphate
  modified_base 18: mod_base = OTHER; note = 2'-O-methylguanosine-3'-phosphate
  modified_base 19: mod_base = OTHER; note = 2'-O-methyladenosine-3'-phosphate
  modified_base 20: mod_base = OTHER; note = 2'-O-methyladenosine-3'-phosphate
  modified_base 21: mod_base = OTHER; note = 2'-O-methyluridine-3'-phosphate N-[tris(GalNAc-alkyl)-amidodecanoyl)]-4-hydroxyprolinol (Hyp-(GalNAc-alkyl)3)
ccgaccagcttgtttgtgaat

SEQ ID NO: 3259 - RNA, 21 nt, synthetic construct
  source 1..21: mol_type = other RNA
  modified_base 1: mod_base = OTHER; note = 2'-O-methylcytidine-3'-phosphorothioate
  modified_base 2: mod_base = OTHER; note = 2'-O-methylguanosine-3'-phosphorothioate
  modified_base 3: mod_base = OTHER; note = 2'-O-methyladenosine-3'-phosphate
  modified_base 4: mod_base = OTHER; note = 2'-O-methylcytidine-3'-phosphate
  modified_base 5: mod_base = OTHER; note = 2'-O-methylcytidine-3'-phosphate
  modified_base 6: mod_base = OTHER; note = 2'-O-methyladenosine-3'-phosphate
  modified_base 7: mod_base = OTHER; note = 2'-fluoroguanosine-3'-phosphate
  modified_base 8: mod_base = OTHER; note = 2'-O-methylcytidine-3'-phosphate
  modified_base 9: mod_base = OTHER; note = 2'-fluorouridine-3'-phosphate
  modified_base 10: mod_base = OTHER; note = 2'-fluorouridine-3'-phosphate
  modified_base 11: mod_base = OTHER; note = 2'-fluoroguanosine-3'-phosphate
  modified_base 12: mod_base = OTHER; note = 2'-O-methyluridine-3'-phosphate
  modified_base 13: mod_base = OTHER; note = 2'-O-methyluridine-3'-phosphate
  modified_base 14: mod_base = OTHER; note = 2'-O-methyluridine-3'-phosphate
  modified_base 15: mod_base = OTHER; note = 2'-O-methylguanosine-3'-phosphate
  modified_base 16: mod_base = OTHER; note = 2'-O-methyluridine-3'-phosphate
  modified_base 17: mod_base = OTHER; note = 2'-O-methylguanosine-3'-phosphate
  modified_base 18: mod_base = OTHER; note = 2'-O-methyladenosine-3'-phosphate
  modified_base 19: mod_base = OTHER; note = 2'-O-methyladenosine-3'-phosphate
  modified_base 20: mod_base = OTHER; note = 2'-O-methyladenosine-3'-phosphate
  modified_base 21: mod_base = OTHER; note = 2'-O-methyluridine-3'-phosphate N-[tris(GalNAc-alkyl)-amidodecanoyl)]-4-hydroxyprolinol (Hyp-(GalNAc-alkyl)3)
cgaccagcttgtttgtgaaat

SEQ ID NO: 3260 - RNA, 21 nt, synthetic construct
  source 1..21: mol_type = other RNA
  modified_base 1: mod_base = OTHER; note = 2'-O-methylguanosine-3'-phosphorothioate
  modified_base 2: mod_base = OTHER; note = 2'-O-methyladenosine-3'-phosphorothioate
  modified_base 3: mod_base = OTHER; note = 2'-O-methylcytidine-3'-phosphate
  modified_base 4: mod_base = OTHER; note = 2'-O-methylcytidine-3'-phosphate
  modified_base 5: mod_base = OTHER; note = 2'-O-methyladenosine-3'-phosphate
  modified_base 6: mod_base = OTHER; note = 2'-O-methylguanosine-3'-phosphate
  modified_base 7: mod_base = OTHER; note = 2'-fluorocytidine-3'-phosphate
  modified_base 8: mod_base = OTHER; note = 2'-O-methyluridine-3'-phosphate
  modified_base 9: mod_base = OTHER; note = 2'-fluorouridine-3'-phosphate
  modified_base 10: mod_base = OTHER; note = 2'-fluoroguanosine-3'-phosphate
  modified_base 11: mod_base = OTHER; note = 2'-fluorouridine-3'-phosphate
  modified_base 12: mod_base = OTHER; note = 2'-O-methyluridine-3'-phosphate
  modified_base 13: mod_base = OTHER; note = 2'-O-methyluridine-3'-phosphate
  modified_base 14: mod_base = OTHER; note = 2'-O-methylguanosine-3'-phosphate
  modified_base 15: mod_base = OTHER; note = 2'-O-methyluridine-3'-phosphate
  modified_base 16: mod_base = OTHER; note = 2'-O-methylguanosine-3'-phosphate
  modified_base 17: mod_base = OTHER; note = 2'-O-methyladenosine-3'-phosphate
  modified_base 18: mod_base = OTHER; note = 2'-O-methyladenosine-3'-phosphate
  modified_base 19: mod_base = OTHER; note = 2'-O-methyladenosine-3'-phosphate
  modified_base 20: mod_base = OTHER; note = 2'-O-methylcytidine-3'-phosphate
  modified_base 21: mod_base = OTHER; note = 2'-O-methyluridine-3'-phosphate N-[tris(GalNAc-alkyl)-amidodecanoyl)]-4-hydroxyprolinol (Hyp-(GalNAc-alkyl)3)
gaccagcttgtttgtgaaact

SEQ ID NO: 3261 - RNA, 21 nt, synthetic construct
  source 1..21: mol_type = other RNA
  modified_base 1: mod_base = OTHER; note = 2'-O-methyladenosine-3'-phosphorothioate
  modified_base 2: mod_base = OTHER; note = 2'-O-methylcytidine-3'-phosphorothioate
  modified_base 3: mod_base = OTHER; note = 2'-O-methylcytidine-3'-phosphate
  modified_base 4: mod_base = OTHER; note = 2'-O-methyladenosine-3'-phosphate
  modified_base 5: mod_base = OTHER; note = 2'-O-methylguanosine-3'-phosphate
  modified_base 6: mod_base = OTHER; note = 2'-O-methylcytidine-3'-phosphate
  modified_base 7: mod_base = OTHER; note = 2'-fluorouridine-3'-phosphate
  modified_base 8: mod_base = OTHER; note = 2'-O-methyluridine-3'-phosphate
  modified_base 9: mod_base = OTHER; note = 2'-fluoroguanosine-3'-phosphate
  modified_base 10: mod_base = OTHER; note = 2'-fluorouridine-3'-phosphate
  modified_base 11: mod_base = OTHER; note = 2'-fluorouridine-3'-phosphate
  modified_base 12: mod_base = OTHER; note = 2'-O-methyluridine-3'-phosphate
  modified_base 13: mod_base = OTHER; note = 2'-O-methylguanosine-3'-phosphate
  modified_base 14: mod_base = OTHER; note = 2'-O-methyluridine-3'-phosphate
  modified_base 15: mod_base = OTHER; note = 2'-O-methylguanosine-3'-phosphate
  modified_base 16: mod_base = OTHER; note = 2'-O-methyladenosine-3'-phosphate
  modified_base 17: mod_base = OTHER; note = 2'-O-methyladenosine-3'-phosphate
  modified_base 18: mod_base = OTHER; note = 2'-O-methyladenosine-3'-phosphate
  modified_base 19: mod_base = OTHER; note = 2'-O-methylcytidine-3'-phosphate
  modified_base 20: mod_base = OTHER; note = 2'-O-methyladenosine-3'-phosphate
  modified_base 21: mod_base = OTHER; note = 2'-O-methyluridine-3'-phosphate N-[tris(GalNAc-alkyl)-amidodecanoyl)]-4-hydroxyprolinol (Hyp-(GalNAc-alkyl)3)
accagcttgtttgtgaaacat

SEQ ID NO: 3262 - RNA, 21 nt, synthetic construct
  source 1..21: mol_type = other RNA
  modified_base 1: mod_base = OTHER; note = 2'-O-methylcytidine-3'-phosphorothioate
  modified_base 2: mod_base = OTHER; note = 2'-O-methylcytidine-3'-phosphorothioate
  modified_base 3: mod_base = OTHER; note = 2'-O-methyladenosine-3'-phosphate
  modified_base 4: mod_base = OTHER; note = 2'-O-methylguanosine-3'-phosphate
  modified_base 5: mod_base = OTHER; note = 2'-O-methylcytidine-3'-phosphate
  modified_base 6: mod_base = OTHER; note = 2'-O-methyluridine-3'-phosphate
  modified_base 7: mod_base = OTHER; note = 2'-fluorouridine-3'-phosphate
  modified_base 8: mod_base = OTHER; note = 2'-O-methylguanosine-3'-phosphate
  modified_base 9: mod_base = OTHER; note = 2'-fluorouridine-3'-phosphate
  modified_base 10: mod_base = OTHER; note = 2'-fluorouridine-3'-phosphate
  modified_base 11: mod_base = OTHER; note = 2'-fluorouridine-3'-phosphate
  modified_base 12: mod_base = OTHER; note = 2'-O-methylguanosine-3'-phosphate
  modified_base 13: mod_base = OTHER; note = 2'-O-methyluridine-3'-phosphate
  modified_base 14: mod_base = OTHER; note = 2'-O-methylguanosine-3'-phosphate
  modified_base 15: mod_base = OTHER; note = 2'-O-methyladenosine-3'-phosphate
  modified_base 16: mod_base = OTHER; note = 2'-O-methyladenosine-3'-phosphate
  modified_base 17: mod_base = OTHER; note = 2'-O-methyladenosine-3'-phosphate
  modified_base 18: mod_base = OTHER; note = 2'-O-methylcytidine-3'-phosphate
  modified_base 19: mod_base = OTHER; note = 2'-O-methyladenosine-3'-phosphate
  modified_base 20: mod_base = OTHER; note = 2'-O-methyladenosine-3'-phosphate
  modified_base 21: mod_base = OTHER; note = 2'-O-methyluridine-3'-phosphate N-[tris(GalNAc-alkyl)-amidodecanoyl)]-4-hydroxyprolinol (Hyp-(GalNAc-alkyl)3)
ccagcttgtttgtgaaacaat

SEQ ID NO: 3263 - RNA, 21 nt, synthetic construct
  source 1..21: mol_type = other RNA
  modified_base 1: mod_base = OTHER; note = 2'-O-methylcytidine-3'-phosphorothioate
  modified_base 2: mod_base = OTHER; note = 2'-O-methyladenosine-3'-phosphorothioate
  modified_base 3: mod_base = OTHER; note = 2'-O-methylguanosine-3'-phosphate
  modified_base 4: mod_base = OTHER; note = 2'-O-methylcytidine-3'-phosphate
  modified_base 5: mod_base = OTHER; note = 2'-O-methyluridine-3'-phosphate
  modified_base 6: mod_base = OTHER; note = 2'-O-methyluridine-3'-phosphate
  modified_base 7: mod_base = OTHER; note = 2'-fluoroguanosine-3'-phosphate
  modified_base 8: mod_base = OTHER; note = 2'-O-methyluridine-3'-phosphate
  modified_base 9: mod_base = OTHER; note = 2'-fluorouridine-3'-phosphate
  modified_base 10: mod_base = OTHER; note = 2'-fluorouridine-3'-phosphate
  modified_base 11: mod_base = OTHER; note = 2'-fluoroguanosine-3'-phosphate
  modified_base 12: mod_base = OTHER; note = 2'-O-methyluridine-3'-phosphate
  modified_base 13: mod_base = OTHER; note = 2'-O-methylguanosine-3'-phosphate
  modified_base 14: mod_base = OTHER; note = 2'-O-methyladenosine-3'-phosphate
  modified_base 15: mod_base = OTHER; note = 2'-O-methyladenosine-3'-phosphate
  modified_base 16: mod_base = OTHER; note = 2'-O-methyladenosine-3'-phosphate
  modified_base 17: mod_base = OTHER; note = 2'-O-methylcytidine-3'-phosphate
  modified_base 18: mod_base = OTHER; note = 2'-O-methyladenosine-3'-phosphate
  modified_base 19: mod_base = OTHER; note = 2'-O-methyladenosine-3'-phosphate
  modified_base 20: mod_base = OTHER; note = 2'-O-methyladenosine-3'-phosphate
  modified_base 21: mod_base = OTHER; note = 2'-O-methyluridine-3'-phosphate N-[tris(GalNAc-alkyl)-amidodecanoyl)]-4-hydroxyprolinol (Hyp-(GalNAc-alkyl)3)
cagcttgtttgtgaaacaaat

SEQ ID NO: 3264 - RNA, 21 nt, synthetic construct
  source 1..21: mol_type = other RNA
  modified_base 1: mod_base = OTHER; note = 2'-O-methyladenosine-3'-phosphorothioate
  modified_base 2: mod_base = OTHER; note = 2'-O-methylguanosine-3'-phosphorothioate
  modified_base 3: mod_base = OTHER; note = 2'-O-methylcytidine-3'-phosphate
  modified_base 4: mod_base = OTHER; note = 2'-O-methyluridine-3'-phosphate
  modified_base 5: mod_base = OTHER; note = 2'-O-methyluridine-3'-phosphate
  modified_base 6: mod_base = OTHER; note = 2'-O-methylguanosine-3'-phosphate
  modified_base 7: mod_base = OTHER; note = 2'-fluorouridine-3'-phosphate
  modified_base 8: mod_base = OTHER; note = 2'-O-methyluridine-3'-phosphate
  modified_base 9: mod_base = OTHER; note = 2'-fluorouridine-3'-phosphate
  modified_base 10: mod_base = OTHER; note = 2'-fluoroguanosine-3'-phosphate
  modified_base 11: mod_base = OTHER; note = 2'-fluorouridine-3'-phosphate
  modified_base 12: mod_base = OTHER; note = 2'-O-methylguanosine-3'-phosphate
  modified_base 13: mod_base = OTHER; note = 2'-O-methyladenosine-3'-phosphate
  modified_base 14: mod_base = OTHER; note = 2'-O-methyladenosine-3'-phosphate
  modified_base 15: mod_base = OTHER; note = 2'-O-methyladenosine-3'-phosphate
  modified_base 16: mod_base = OTHER; note = 2'-O-methylcytidine-3'-phosphate
  modified_base 17: mod_base = OTHER; note = 2'-O-methyladenosine-3'-phosphate
  modified_base 18: mod_base = OTHER; note = 2'-O-methyladenosine-3'-phosphate
  modified_base 19: mod_base = OTHER; note = 2'-O-methyladenosine-3'-phosphate
  modified_base 20: mod_base = OTHER; note = 2'-O-methyladenosine-3'-phosphate
  modified_base 21: mod_base = OTHER; note = 2'-O-methyluridine-3'-phosphate N-[tris(GalNAc-alkyl)-amidodecanoyl)]-4-hydroxyprolinol (Hyp-(GalNAc-alkyl)3)
agcttgtttgtgaaacaaaat

SEQ ID NO: 3265 - RNA, 21 nt, synthetic construct
  source 1..21: mol_type = other RNA
  modified_base 1: mod_base = OTHER; note = 2'-O-methyluridine-3'-phosphorothioate
  modified_base 2: mod_base = OTHER; note = 2'-O-methyluridine-3'-phosphorothioate
  modified_base 3: mod_base = OTHER; note = 2'-O-methylcytidine-3'-phosphate
  modified_base 4: mod_base = OTHER; note = 2'-O-methylcytidine-3'-phosphate
  modified_base 5: mod_base = OTHER; note = 2'-O-methylcytidine-3'-phosphate
  modified_base 6: mod_base = OTHER; note = 2'-O-methyluridine-3'-phosphate
  modified_base 7: mod_base = OTHER; note = 2'-fluorouridine-3'-phosphate
  modified_base 8: mod_base = OTHER; note = 2'-O-methyluridine-3'-phosphate
  modified_base 9: mod_base = OTHER; note = 2'-fluorouridine-3'-phosphate
  modified_base 10: mod_base = OTHER; note = 2'-fluorocytidine-3'-phosphate
  modified_base 11: mod_base = OTHER; note = 2'-fluoroadenosine-3'-phosphate
  modified_base 12: mod_base = OTHER; note = 2'-O-methyladenosine-3'-phosphate
  modified_base 13: mod_base = OTHER; note = 2'-O-methylguanosine-3'-phosphate
  modified_base 14: mod_base = OTHER; note = 2'-O-methyluridine-3'-phosphate
  modified_base 15: mod_base = OTHER; note = 2'-O-methyluridine-3'-phosphate
  modified_base 16: mod_base = OTHER; note = 2'-O-methylguanosine-3'-phosphate
  modified_base 17: mod_base = OTHER; note = 2'-O-methyladenosine-3'-phosphate
  modified_base 18: mod_base = OTHER; note = 2'-O-methylguanosine-3'-phosphate
  modified_base 19: mod_base = OTHER; note = 2'-O-methyladenosine-3'-phosphate
  modified_base 20: mod_base = OTHER; note = 2'-O-methyladenosine-3'-phosphate
  modified_base 21: mod_base = OTHER; note = 2'-O-methyluridine-3'-phosphate N-[tris(GalNAc-alkyl)-amidodecanoyl)]-4-hydroxyprolinol (Hyp-(GalNAc-alkyl)3)
ttcccttttcaagttgagaat

SEQ ID NO: 3266 - RNA, 21 nt, synthetic construct
  source 1..21: mol_type = other RNA
  modified_base 1: mod_base = OTHER; note = 2'-O-methyladenosine-3'-phosphorothioate
  modified_base 2: mod_base = OTHER; note = 2'-O-methylguanosine-3'-phosphorothioate
  modified_base 3: mod_base = OTHER; note = 2'-O-methyluridine-3'-phosphate
  modified_base 4: mod_base = OTHER; note = 2'-O-methyladenosine-3'-phosphate
  modified_base 5: mod_base = OTHER; note = 2'-O-methyluridine-3'-phosphate
  modified_base 6: mod_base = OTHER; note = 2'-O-methyladenosine-3'-phosphate
  modified_base 7: mod_base = OTHER; note = 2'-fluorocytidine-3'-phosphate
  modified_base 8: mod_base = OTHER; note = 2'-O-methyladenosine-3'-phosphate
  modified_base 9: mod_base = OTHER; note = 2'-fluorouridine-3'-phosphate
  modified_base 10: mod_base = OTHER; note = 2'-fluorouridine-3'-phosphate
  modified_base 11: mod_base = OTHER; note = 2'-fluorouridine-3'-phosphate
  modified_base 12: mod_base = OTHER; note = 2'-O-methyluridine-3'-phosphate
  modified_base 13: mod_base = OTHER; note = 2'-O-methyluridine-3'-phosphate
  modified_base 14: mod_base = OTHER; note = 2'-O-methylguanosine-3'-phosphate
  modified_base 15: mod_base = OTHER; note = 2'-O-methylcytidine-3'-phosphate
  modified_base 16: mod_base = OTHER; note = 2'-O-methyladenosine-3'-phosphate
  modified_base 17: mod_base = OTHER; note = 2'-O-methyluridine-3'-phosphate
  modified_base 18: mod_base = OTHER; note = 2'-O-methyluridine-3'-phosphate
  modified_base 19: mod_base = OTHER; note = 2'-O-methylguanosine-3'-phosphate
  modified_base 20: mod_base = OTHER; note = 2'-O-methylcytidine-3'-phosphate
  modified_base 21: mod_base = OTHER; note = 2'-O-methyluridine-3'-phosphate N-[tris(GalNAc-alkyl)-amidodecanoyl)]-4-hydroxyprolinol (Hyp-(GalNAc-alkyl)3)
agtatacatttttgcattgct

SEQ ID NO: 3267 - RNA, 21 nt, synthetic construct
  source 1..21: mol_type = other RNA
  modified_base 1: mod_base = OTHER; note = 2'-O-methyluridine-3'-phosphorothioate
  modified_base 2: mod_base = OTHER; note = 2'-O-methyladenosine-3'-phosphorothioate
  modified_base 3: mod_base = OTHER; note = 2'-O-methyluridine-3'-phosphate
  modified_base 4: mod_base = OTHER; note = 2'-O-methyladenosine-3'-phosphate
  modified_base 5: mod_base = OTHER; note = 2'-O-methylcytidine-3'-phosphate
  modified_base 6: mod_base = OTHER; note = 2'-O-methyladenosine-3'-phosphate
  modified_base 7: mod_base = OTHER; note = 2'-fluorouridine-3'-phosphate
  modified_base 8: mod_base = OTHER; note = 2'-O-methyluridine-3'-phosphate
  modified_base 9: mod_base = OTHER; note = 2'-fluorouridine-3'-phosphate
  modified_base 10: mod_base = OTHER; note = 2'-fluorouridine-3'-phosphate
  modified_base 11: mod_base = OTHER; note = 2'-fluorouridine-3'-phosphate
  modified_base 12: mod_base = OTHER; note = 2'-O-methylguanosine-3'-phosphate
  modified_base 13: mod_base = OTHER; note = 2'-O-methylcytidine-3'-phosphate
  modified_base 14: mod_base = OTHER; note = 2'-O-methyladenosine-3'-phosphate
  modified_base 15: mod_base = OTHER; note = 2'-O-methyluridine-3'-phosphate
  modified_base 16: mod_base = OTHER; note = 2'-O-methyluridine-3'-phosphate
  modified_base 17: mod_base = OTHER; note = 2'-O-methylguanosine-3'-phosphate
  modified_base 18: mod_base = OTHER; note = 2'-O-methylcytidine-3'-phosphate
  modified_base 19: mod_base = OTHER; note = 2'-O-methylcytidine-3'-phosphate
  modified_base 20: mod_base = OTHER; note = 2'-O-methyluridine-3'-phosphate
  modified_base 21: mod_base = OTHER; note = 2'-O-methyluridine-3'-phosphate N-[tris(GalNAc-alkyl)-amidodecanoyl)]-4-hydroxyprolinol (Hyp-(GalNAc-alkyl)3)
tatacatttttgcattgcctt

SEQ ID NO: 3268 - RNA, 21 nt, synthetic construct
  source 1..21: mol_type = other RNA
  modified_base 1: mod_base = OTHER; note = 2'-O-methyluridine-3'-phosphorothioate
  modified_base 2: mod_base = OTHER; note = 2'-O-methyluridine-3'-phosphorothioate
  modified_base 3: mod_base = OTHER; note = 2'-O-methylcytidine-3'-phosphate
  modified_base 4: mod_base = OTHER; note = 2'-O-methylguanosine-3'-phosphate
  modified_base 5: mod_base = OTHER; note = 2'-O-methylguanosine-3'-phosphate
  modified_base 6: mod_base = OTHER; note = 2'-O-methyluridine-3'-phosphate
  modified_base 7: mod_base = OTHER; note = 2'-fluorouridine-3'-phosphate
  modified_base 8: mod_base = OTHER; note = 2'-O-methyluridine-3'-phosphate
  modified_base 9: mod_base = OTHER; note = 2'-fluoroguanosine-3'-phosphate
  modified_base 10: mod_base = OTHER; note = 2'-fluorouridine-3'-phosphate
  modified_base 11: mod_base = OTHER; note = 2'-fluoroadenosine-3'-phosphate
  modified_base 12: mod_base = OTHER; note = 2'-O-methyluridine-3'-phosphate
  modified_base 13: mod_base = OTHER; note = 2'-O-methyluridine-3'-phosphate
  modified_base 14: mod_base = OTHER; note = 2'-O-methyluridine-3'-phosphate
  modified_base 15: mod_base = OTHER; note = 2'-O-methyladenosine-3'-phosphate
  modified_base 16: mod_base = OTHER; note = 2'-O-methylguanosine-3'-phosphate
  modified_base 17: mod_base = OTHER; note = 2'-O-methyluridine-3'-phosphate
  modified_base 18: mod_base = OTHER; note = 2'-O-methylguanosine-3'-phosphate
  modified_base 19: mod_base = OTHER; note = 2'-O-methyluridine-3'-phosphate
  modified_base 20: mod_base = OTHER; note = 2'-O-methylcytidine-3'-phosphate
  modified_base 21: mod_base = OTHER; note = 2'-O-methyluridine-3'-phosphate N-[tris(GalNAc-alkyl)-amidodecanoyl)]-4-hydroxyprolinol (Hyp-(GalNAc-alkyl)3)
ttcggtttgtatttagtgtct

SEQ ID NO: 3269 - RNA, 21 nt, synthetic construct
  source 1..21: mol_type = other RNA
  modified_base 1: mod_base = OTHER; note = 2'-O-methyluridine-3'-phosphorothioate
  modified_base 2: mod_base = OTHER; note = 2'-O-methylcytidine-3'-phosphorothioate
  modified_base 3: mod_base = OTHER; note = 2'-O-methylguanosine-3'-phosphate
  modified_base 4: mod_base = OTHER; note = 2'-O-methylguanosine-3'-phosphate
  modified_base 5: mod_base = OTHER; note = 2'-O-methyluridine-3'-phosphate
  modified_base 6: mod_base = OTHER; note = 2'-O-methyluridine-3'-phosphate
  modified_base 7: mod_base = OTHER; note = 2'-fluorouridine-3'-phosphate
  modified_base 8: mod_base = OTHER; note = 2'-O-methylguanosine-3'-phosphate
  modified_base 9: mod_base = OTHER; note = 2'-fluorouridine-3'-phosphate
  modified_base 10: mod_base = OTHER; note = 2'-fluoroadenosine-3'-phosphate
  modified_base 11: mod_base = OTHER; note = 2'-fluorouridine-3'-phosphate
  modified_base 12: mod_base = OTHER; note = 2'-O-methyluridine-3'-phosphate
  modified_base 13: mod_base = OTHER; note = 2'-O-methyluridine-3'-phosphate
  modified_base 14: mod_base = OTHER; note = 2'-O-methyladenosine-3'-phosphate
  modified_base 15: mod_base = OTHER; note = 2'-O-methylguanosine-3'-phosphate
  modified_base 16: mod_base = OTHER; note = 2'-O-methyluridine-3'-phosphate
  modified_base 17: mod_base = OTHER; note = 2'-O-methylguanosine-3'-phosphate
  modified_base 18: mod_base = OTHER; note = 2'-O-methyluridine-3'-phosphate
  modified_base 19: mod_base = OTHER; note = 2'-O-methylcytidine-3'-phosphate
  modified_base 20: mod_base = OTHER; note = 2'-O-methyluridine-3'-phosphate
  modified_base 21: mod_base = OTHER; note = 2'-O-methyluridine-3'-phosphate N-[tris(GalNAc-alkyl)-amidodecanoyl)]-4-hydroxyprolinol (Hyp-(GalNAc-alkyl)3)
tcggtttgtatttagtgtctt

SEQ ID NO: 3270 - RNA, 21 nt, synthetic construct
  source 1..21: mol_type = other RNA
  modified_base 1: mod_base = OTHER; note = 2'-O-methylcytidine-3'-phosphorothioate
  modified_base 2: mod_base = OTHER; note = 2'-O-methylguanosine-3'-phosphorothioate
  modified_base 3: mod_base = OTHER; note = 2'-O-methylguanosine-3'-phosphate
  modified_base 4: mod_base = OTHER; note = 2'-O-methyluridine-3'-phosphate
  modified_base 5: mod_base = OTHER; note = 2'-O-methyluridine-3'-phosphate
  modified_base 6: mod_base = OTHER; note = 2'-O-methyluridine-3'-phosphate
  modified_base 7: mod_base = OTHER; note = 2'-fluoroguanosine-3'-phosphate
  modified_base 8: mod_base = OTHER; note = 2'-O-methyluridine-3'-phosphate
  modified_base 9: mod_base = OTHER; note = 2'-fluoroadenosine-3'-phosphate
  modified_base 10: mod_base = OTHER; note = 2'-fluorouridine-3'-phosphate
  modified_base 11: mod_base = OTHER; note = 2'-fluorouridine-3'-phosphate
  modified_base 12: mod_base = OTHER; note = 2'-O-methyluridine-3'-phosphate
  modified_base 13: mod_base = OTHER; note = 2'-O-methyladenosine-3'-phosphate
  modified_base 14: mod_base = OTHER; note = 2'-O-methylguanosine-3'-phosphate
  modified_base 15: mod_base = OTHER; note = 2'-O-methyluridine-3'-phosphate
  modified_base 16: mod_base = OTHER; note = 2'-O-methylguanosine-3'-phosphate
  modified_base 17: mod_base = OTHER; note = 2'-O-methyluridine-3'-phosphate
  modified_base 18: mod_base = OTHER; note = 2'-O-methylcytidine-3'-phosphate
  modified_base 19: mod_base = OTHER; note = 2'-O-methyluridine-3'-phosphate
  modified_base 20: mod_base = OTHER; note = 2'-O-methyluridine-3'-phosphate
  modified_base 21: mod_base = OTHER; note = 2'-O-methyluridine-3'-phosphate N-[tris(GalNAc-alkyl)-amidodecanoyl)]-4-hydroxyprolinol (Hyp-(GalNAc-alkyl)3)
cggtttgtatttagtgtcttt

SEQ ID NO: 3271 - RNA, 21 nt, synthetic construct
  source 1..21: mol_type = other RNA
  modified_base 1: mod_base = OTHER; note = 2'-O-methylguanosine-3'-phosphorothioate
  modified_base 2: mod_base = OTHER; note = 2'-O-methyluridine-3'-phosphorothioate
  modified_base 3: mod_base = OTHER; note = 2'-O-methyluridine-3'-phosphate
  modified_base 4: mod_base = OTHER; note = 2'-O-methyluridine-3'-phosphate
  modified_base 5: mod_base = OTHER; note = 2'-O-methylguanosine-3'-phosphate
  modified_base 6: mod_base = OTHER; note = 2'-O-methyluridine-3'-phosphate
  modified_base 7: mod_base = OTHER; note = 2'-fluoroadenosine-3'-phosphate
  modified_base 8: mod_base = OTHER; note = 2'-O-methyluridine-3'-phosphate
  modified_base 9: mod_base = OTHER; note = 2'-fluorouridine-3'-phosphate
  modified_base 10: mod_base = OTHER; note = 2'-fluorouridine-3'-phosphate
  modified_base 11: mod_base = OTHER; note = 2'-fluoroadenosine-3'-phosphate
  modified_base 12: mod_base = OTHER; note = 2'-O-methylguanosine-3'-phosphate
  modified_base 13: mod_base = OTHER; note = 2'-O-methyluridine-3'-phosphate
  modified_base 14: mod_base = OTHER; note = 2'-O-methylguanosine-3'-phosphate
  modified_base 15: mod_base = OTHER; note = 2'-O-methyluridine-3'-phosphate
  modified_base 16: mod_base = OTHER; note = 2'-O-methylcytidine-3'-phosphate
  modified_base 17: mod_base = OTHER; note = 2'-O-methyluridine-3'-phosphate
  modified_base 18: mod_base = OTHER; note = 2'-O-methyluridine-3'-phosphate
  modified_base 19: mod_base = OTHER; note = 2'-O-methylguanosine-3'-phosphate
  modified_base 20: mod_base = OTHER; note = 2'-O-methyladenosine-3'-phosphate
  modified_base 21: mod_base = OTHER; note = 2'-O-methyluridine-3'-phosphate N-[tris(GalNAc-alkyl)-amidodecanoyl)]-4-hydroxyprolinol (Hyp-(GalNAc-alkyl)3)
gtttgtatttagtgtcttgat

SEQ ID NO: 3272 - RNA, 21 nt, synthetic construct
  source 1..21: mol_type = other RNA
  modified_base 1: mod_base = OTHER; note = 2'-O-methyluridine-3'-phosphorothioate
  modified_base 2: mod_base = OTHER; note = 2'-O-methyluridine-3'-phosphorothioate
  modified_base 3: mod_base = OTHER; note = 2'-O-methyluridine-3'-phosphate
  modified_base 4: mod_base = OTHER; note = 2'-O-methylguanosine-3'-phosphate
  modified_base 5: mod_base = OTHER; note = 2'-O-methyluridine-3'-phosphate
  modified_base 6: mod_base = OTHER; note = 2'-O-methyladenosine-3'-phosphate
  modified_base 7: mod_base = OTHER; note = 2'-fluorouridine-3'-phosphate
  modified_base 8: mod_base = OTHER; note = 2'-O-methyluridine-3'-phosphate
  modified_base 9: mod_base = OTHER; note = 2'-fluorouridine-3'-phosphate
  modified_base 10: mod_base = OTHER; note = 2'-fluoroadenosine-3'-phosphate
  modified_base 11: mod_base = OTHER; note = 2'-fluoroguanosine-3'-phosphate
  modified_base 12: mod_base = OTHER; note = 2'-O-methyluridine-3'-phosphate
  modified_base 13: mod_base = OTHER; note = 2'-O-methylguanosine-3'-phosphate
  modified_base 14: mod_base = OTHER; note = 2'-O-methyluridine-3'-phosphate
  modified_base 15: mod_base = OTHER; note = 2'-O-methylcytidine-3'-phosphate
  modified_base 16: mod_base = OTHER; note = 2'-O-methyluridine-3'-phosphate
  modified_base 17: mod_base = OTHER; note = 2'-O-methyluridine-3'-phosphate
  modified_base 18: mod_base = OTHER; note = 2'-O-methylguanosine-3'-phosphate
  modified_base 19: mod_base = OTHER; note = 2'-O-methyladenosine-3'-phosphate
  modified_base 20: mod_base = OTHER; note = 2'-O-methyladenosine-3'-phosphate
  modified_base 21: mod_base = OTHER; note = 2'-O-methyluridine-3'-phosphate N-[tris(GalNAc-alkyl)-amidodecanoyl)]-4-hydroxyprolinol (Hyp-(GalNAc-alkyl)3)
tttgtatttagtgtcttgaat

SEQ ID NO: 3273 - RNA, 21 nt, synthetic construct
  source 1..21: mol_type = other RNA
  modified_base 1: mod_base = OTHER; note = 2'-O-methyluridine-3'-phosphorothioate
  modified_base 2: mod_base = OTHER; note = 2'-O-methyluridine-3'-phosphorothioate
  modified_base 3: mod_base = OTHER; note = 2'-O-methylguanosine-3'-phosphate
  modified_base 4: mod_base = OTHER; note = 2'-O-methyluridine-3'-phosphate
  modified_base 5: mod_base = OTHER; note = 2'-O-methyladenosine-3'-phosphate
  modified_base 6: mod_base = OTHER; note = 2'-O-methyluridine-3'-phosphate
  modified_base 7: mod_base = OTHER; note = 2'-fluorouridine-3'-phosphate
  modified_base 8: mod_base = OTHER; note = 2'-O-methyluridine-3'-phosphate
  modified_base 9: mod_base = OTHER; note = 2'-fluoroadenosine-3'-phosphate
  modified_base 10: mod_base = OTHER; note = 2'-fluoroguanosine-3'-phosphate
  modified_base 11: mod_base = OTHER; note = 2'-fluorouridine-3'-phosphate
  modified_base 12: mod_base = OTHER; note = 2'-O-methylguanosine-3'-phosphate
  modified_base 13: mod_base = OTHER; note = 2'-O-methyluridine-3'-phosphate
  modified_base 14: mod_base = OTHER; note = 2'-O-methylcytidine-3'-phosphate
  modified_base 15: mod_base = OTHER; note = 2'-O-methyluridine-3'-phosphate
  modified_base 16: mod_base = OTHER; note = 2'-O-methyluridine-3'-phosphate
  modified_base 17: mod_base = OTHER; note = 2'-O-methylguanosine-3'-phosphate
  modified_base 18: mod_base = OTHER; note = 2'-O-methyladenosine-3'-phosphate
  modified_base 19: mod_base = OTHER; note = 2'-O-methyladenosine-3'-phosphate
  modified_base 20: mod_base = OTHER; note = 2'-O-methyluridine-3'-phosphate
  modified_base 21: mod_base = OTHER; note = 2'-O-methyluridine-3'-phosphate N-[tris(GalNAc-alkyl)-amidodecanoyl)]-4-hydroxyprolinol (Hyp-(GalNAc-alkyl)3)
ttgtatttagtgtcttgaatt

SEQ ID NO: 3274 - RNA, 21 nt, synthetic construct
  source 1..21: mol_type = other RNA
  modified_base 1: mod_base = OTHER; note = 2'-O-methylguanosine-3'-phosphorothioate
  modified_base 2: mod_base = OTHER; note = 2'-O-methyluridine-3'-phosphorothioate
  modified_base 3: mod_base = OTHER; note = 2'-O-methyladenosine-3'-phosphate
  modified_base 4: mod_base = OTHER; note = 2'-O-methyluridine-3'-phosphate
  modified_base 5: mod_base = OTHER; note = 2'-O-methyluridine-3'-phosphate
  modified_base 6: mod_base = OTHER; note = 2'-O-methyluridine-3'-phosphate
  modified_base 7: mod_base = OTHER; note = 2'-fluoroadenosine-3'-phosphate
  modified_base 8: mod_base = OTHER; note = 2'-O-methylguanosine-3'-phosphate
  modified_base 9: mod_base = OTHER; note = 2'-fluorouridine-3'-phosphate
  modified_base 10: mod_base = OTHER; note = 2'-fluoroguanosine-3'-phosphate
  modified_base 11: mod_base = OTHER; note = 2'-fluorouridine-3'-phosphate
  modified_base 12: mod_base = OTHER; note = 2'-O-methylcytidine-3'-phosphate
  modified_base 13: mod_base = OTHER; note = 2'-O-methyluridine-3'-phosphate
  modified_base 14: mod_base = OTHER; note = 2'-O-methyluridine-3'-phosphate
  modified_base 15: mod_base = OTHER; note = 2'-O-methylguanosine-3'-phosphate
  modified_base 16: mod_base = OTHER; note = 2'-O-methyladenosine-3'-phosphate
  modified_base 17: mod_base = OTHER; note = 2'-O-methyladenosine-3'-phosphate
  modified_base 18: mod_base = OTHER; note = 2'-O-methyluridine-3'-phosphate
  modified_base 19: mod_base = OTHER; note = 2'-O-methylguanosine-3'-phosphate
  modified_base 20: mod_base = OTHER; note = 2'-O-methyluridine-3'-phosphate
  modified_base 21: mod_base = OTHER; note = 2'-O-methyluridine-3'-phosphate N-[tris(GalNAc-alkyl)-amidodecanoyl)]-4-hydroxyprolinol (Hyp-(GalNAc-alkyl)3)
gtatttagtgtcttgaatgtt

SEQ ID NO: 3275 - RNA, 21 nt, synthetic construct
  source 1..21: mol_type = other RNA
  modified_base 1: mod_base = OTHER; note = 2'-O-methyladenosine-3'-phosphorothioate
  modified_base 2: mod_base = OTHER; note = 2'-O-methyluridine-3'-phosphorothioate
  modified_base 3: mod_base = OTHER; note = 2'-O-methyluridine-3'-phosphate
  modified_base 4: mod_base = OTHER; note = 2'-O-methyluridine-3'-phosphate
  modified_base 5: mod_base = OTHER; note = 2'-O-methyladenosine-3'-phosphate
  modified_base 6: mod_base = OTHER; note = 2'-O-methylguanosine-3'-phosphate
  modified_base 7: mod_base = OTHER; note = 2'-fluorouridine-3'-phosphate
  modified_base 8: mod_base = OTHER; note = 2'-O-methylguanosine-3'-phosphate
  modified_base 9: mod_base = OTHER; note = 2'-fluorouridine-3'-phosphate
  modified_base 10: mod_base = OTHER; note = 2'-fluorocytidine-3'-phosphate
  modified_base 11: mod_base = OTHER; note = 2'-fluorouridine-3'-phosphate
  modified_base 12: mod_base = OTHER; note = 2'-O-methyluridine-3'-phosphate
  modified_base 13: mod_base = OTHER; note = 2'-O-methylguanosine-3'-phosphate
  modified_base 14: mod_base = OTHER; note = 2'-O-methyladenosine-3'-phosphate
  modified_base 15: mod_base = OTHER; note = 2'-O-methyladenosine-3'-phosphate
  modified_base 16: mod_base = OTHER; note = 2'-O-methyluridine-3'-phosphate
  modified_base 17: mod_base = OTHER; note = 2'-O-methylguanosine-3'-phosphate
  modified_base 18: mod_base = OTHER; note = 2'-O-methyluridine-3'-phosphate
  modified_base 19: mod_base = OTHER; note = 2'-O-methyladenosine-3'-phosphate
  modified_base 20: mod_base = OTHER; note = 2'-O-methyladenosine-3'-phosphate
  modified_base 21: mod_base = OTHER; note = 2'-O-methyluridine-3'-phosphate N-[tris(GalNAc-alkyl)-amidodecanoyl)]-4-hydroxyprolinol (Hyp-(GalNAc-alkyl)3)
atttagtgtcttgaatgtaat

SEQ ID NO: 3276 - RNA, 21 nt, synthetic construct
  source 1..21: mol_type = other RNA
  modified_base 1: mod_base = OTHER; note = 2'-O-methyluridine-3'-phosphorothioate
  modified_base 2: mod_base = OTHER; note = 2'-O-methyluridine-3'-phosphorothioate
  modified_base 3: mod_base = OTHER; note = 2'-O-methyladenosine-3'-phosphate
  modified_base 4: mod_base = OTHER; note = 2'-O-methylguanosine-3'-phosphate
  modified_base 5: mod_base = OTHER; note = 2'-O-methyluridine-3'-phosphate
  modified_base 6: mod_base = OTHER; note = 2'-O-methylguanosine-3'-phosphate
  modified_base 7: mod_base = OTHER; note = 2'-fluorouridine-3'-phosphate
  modified_base 8: mod_base = OTHER; note = 2'-O-methylcytidine-3'-phosphate
  modified_base 9: mod_base = OTHER; note = 2'-fluorouridine-3'-phosphate
  modified_base 10: mod_base = OTHER; note = 2'-fluorouridine-3'-phosphate
  modified_base 11: mod_base = OTHER; note = 2'-fluoroguanosine-3'-phosphate
  modified_base 12: mod_base = OTHER; note = 2'-O-methyladenosine-3'-phosphate
  modified_base 13: mod_base = OTHER; note = 2'-O-methyladenosine-3'-phosphate
  modified_base 14: mod_base = OTHER; note = 2'-O-methyluridine-3'-phosphate
  modified_base 15: mod_base = OTHER; note = 2'-O-methylguanosine-3'-phosphate
  modified_base 16: mod_base = OTHER; note = 2'-O-methyluridine-3'-phosphate
  modified_base 17: mod_base = OTHER; note = 2'-O-methyladenosine-3'-phosphate
  modified_base 18: mod_base = OTHER; note = 2'-O-methyladenosine-3'-phosphate
  modified_base 19: mod_base = OTHER; note = 2'-O-methylguanosine-3'-phosphate
  modified_base 20: mod_base = OTHER; note = 2'-O-methyladenosine-3'-phosphate
  modified_base 21: mod_base = OTHER; note = 2'-O-methyluridine-3'-phosphate N-[tris(GalNAc-alkyl)-amidodecanoyl)]-4-hydroxyprolinol (Hyp-(GalNAc-alkyl)3)
ttagtgtcttgaatgtaagat

SEQ ID NO: 3277 - RNA, 21 nt, synthetic construct
  source 1..21: mol_type = other RNA
  modified_base 1: mod_base = OTHER; note = 2'-O-methyluridine-3'-phosphorothioate
  modified_base 2: mod_base = OTHER; note = 2'-O-methyladenosine-3'-phosphorothioate
  modified_base 3: mod_base = OTHER; note = 2'-O-methylguanosine-3'-phosphate
  modified_base 4: mod_base = OTHER; note = 2'-O-methyluridine-3'-phosphate
  modified_base 5: mod_base = OTHER; note = 2'-O-methylguanosine-3'-phosphate
  modified_base 6: mod_base = OTHER; note = 2'-O-methyluridine-3'-phosphate
  modified_base 7: mod_base = OTHER; note = 2'-fluorocytidine-3'-phosphate
  modified_base 8: mod_base = OTHER; note = 2'-O-methyluridine-3'-phosphate
  modified_base 9: mod_base = OTHER; note = 2'-fluorouridine-3'-phosphate
  modified_base 10: mod_base = OTHER; note = 2'-fluoroguanosine-3'-phosphate
  modified_base 11: mod_base = OTHER; note = 2'-fluoroadenosine-3'-phosphate
  modified_base 12: mod_base = OTHER; note = 2'-O-methyladenosine-3'-phosphate
  modified_base 13: mod_base = OTHER; note = 2'-O-methyluridine-3'-phosphate
  modified_base 14: mod_base = OTHER; note = 2'-O-methylguanosine-3'-phosphate
  modified_base 15: mod_base = OTHER; note = 2'-O-methyluridine-3'-phosphate
  modified_base 16: mod_base = OTHER; note = 2'-O-methyladenosine-3'-phosphate
  modified_base 17: mod_base = OTHER; note = 2'-O-methyladenosine-3'-phosphate
  modified_base 18: mod_base = OTHER; note = 2'-O-methylguanosine-3'-phosphate
  modified_base 19: mod_base = OTHER; note = 2'-O-methyladenosine-3'-phosphate
  modified_base 20: mod_base = OTHER; note = 2'-O-methyladenosine-3'-phosphate
  modified_base 21: mod_base = OTHER; note = 2'-O-methyluridine-3'-phosphate N-[tris(GalNAc-alkyl)-amidodecanoyl)]-4-hydroxyprolinol (Hyp-(GalNAc-alkyl)3)
tagtgtcttgaatgtaagaat

SEQ ID NO: 3278 - RNA, 21 nt, synthetic construct
  source 1..21: mol_type = other RNA
  modified_base 1: mod_base = OTHER; note = 2'-O-methyladenosine-3'-phosphorothioate
  modified_base 2: mod_base = OTHER; note = 2'-O-methylguanosine-3'-phosphorothioate
  modified_base 3: mod_base = OTHER; note = 2'-O-methyluridine-3'-phosphate
  modified_base 4: mod_base = OTHER; note = 2'-O-methylguanosine-3'-phosphate
  modified_base 5: mod_base = OTHER; note = 2'-O-methyluridine-3'-phosphate
  modified_base 6: mod_base = OTHER; note = 2'-O-methylcytidine-3'-phosphate
  modified_base 7: mod_base = OTHER; note = 2'-fluorouridine-3'-phosphate
  modified_base 8: mod_base = OTHER; note = 2'-O-methyluridine-3'-phosphate
  modified_base 9: mod_base = OTHER; note = 2'-fluoroguanosine-3'-phosphate
  modified_base 10: mod_base = OTHER; note = 2'-fluoroadenosine-3'-phosphate
  modified_base 11: mod_base = OTHER; note = 2'-fluoroadenosine-3'-phosphate
  modified_base 12: mod_base = OTHER; note = 2'-O-methyluridine-3'-phosphate
  modified_base 13: mod_base = OTHER; note = 2'-O-methylguanosine-3'-phosphate
  modified_base 14: mod_base = OTHER; note = 2'-O-methyluridine-3'-phosphate
  modified_base 15: mod_base = OTHER; note = 2'-O-methyladenosine-3'-phosphate
  modified_base 16: mod_base = OTHER; note = 2'-O-methyladenosine-3'-phosphate
  modified_base 17: mod_base = OTHER; note = 2'-O-methylguanosine-3'-phosphate
  modified_base 18: mod_base = OTHER; note = 2'-O-methyladenosine-3'-phosphate
  modified_base 19: mod_base = OTHER; note = 2'-O-methyladenosine-3'-phosphate
  modified_base 20: mod_base = OTHER; note = 2'-O-methylcytidine-3'-phosphate
  modified_base 21: mod_base = OTHER; note = 2'-O-methyluridine-3'-phosphate N-[tris(GalNAc-alkyl)-amidodecanoyl)]-4-hydroxyprolinol (Hyp-(GalNAc-alkyl)3)
agtgtcttgaatgtaagaact

SEQ ID NO: 3279 - RNA, 21 nt, synthetic construct
  source 1..21: mol_type = other RNA
  modified_base 1: mod_base = OTHER; note = 2'-O-methyluridine-3'-phosphorothioate
  modified_base 2: mod_base = OTHER; note = 2'-O-methylguanosine-3'-phosphorothioate
  modified_base 3: mod_base = OTHER; note = 2'-O-methyluridine-3'-phosphate
  modified_base 4: mod_base = OTHER; note = 2'-O-methylcytidine-3'-phosphate
  modified_base 5: mod_base = OTHER; note = 2'-O-methyluridine-3'-phosphate
  modified_base 6: mod_base = OTHER; note = 2'-O-methyluridine-3'-phosphate
  modified_base 7: mod_base = OTHER; note = 2'-fluoroguanosine-3'-phosphate
  modified_base 8: mod_base = OTHER; note = 2'-O-methyladenosine-3'-phosphate
  modified_base 9: mod_base = OTHER; note = 2'-fluoroadenosine-3'-phosphate
  modified_base 10: mod_base = OTHER; note = 2'-fluorouridine-3'-phosphate
  modified_base 11: mod_base = OTHER; note = 2'-fluoroguanosine-3'-phosphate
  modified_base 12: mod_base = OTHER; note = 2'-O-methyluridine-3'-phosphate
  modified_base 13: mod_base = OTHER; note = 2'-O-methyladenosine-3'-phosphate
  modified_base 14: mod_base = OTHER; note = 2'-O-methyladenosine-3'-phosphate
  modified_base 15: mod_base = OTHER; note = 2'-O-methylguanosine-3'-phosphate
  modified_base 16: mod_base = OTHER; note = 2'-O-methyladenosine-3'-phosphate
  modified_base 17: mod_base = OTHER; note = 2'-O-methyladenosine-3'-phosphate
  modified_base 18: mod_base = OTHER; note = 2'-O-methylcytidine-3'-phosphate
  modified_base 19: mod_base = OTHER; note = 2'-O-methyladenosine-3'-phosphate
  modified_base 20: mod_base = OTHER; note = 2'-O-methyluridine-3'-phosphate
  modified_base 21: mod_base = OTHER; note = 2'-O-methyluridine-3'-phosphate N-[tris(GalNAc-alkyl)-amidodecanoyl)]-4-hydroxyprolinol (Hyp-(GalNAc-alkyl)3)
tgtcttgaatgtaagaacatt

SEQ ID NO: 3280 - RNA, 21 nt, synthetic construct
  source 1..21: mol_type = other RNA
  modified_base 1: mod_base = OTHER; note = 2'-O-methyluridine-3'-phosphorothioate
  modified_base 2: mod_base = OTHER; note = 2'-O-methyluridine-3'-phosphorothioate
  modified_base 3: mod_base = OTHER; note = 2'-O-methylguanosine-3'-phosphate
  modified_base 4: mod_base = OTHER; note = 2'-O-methyladenosine-3'-phosphate
  modified_base 5: mod_base = OTHER; note = 2'-O-methyladenosine-3'-phosphate
  modified_base 6: mod_base = OTHER; note = 2'-O-methyluridine-3'-phosphate
  modified_base 7: mod_base = OTHER; note = 2'-fluoroguanosine-3'-phosphate
  modified_base 8: mod_base = OTHER; note = 2'-O-methyluridine-3'-phosphate
  modified_base 9: mod_base = OTHER; note = 2'-fluoroadenosine-3'-phosphate
  modified_base 10: mod_base = OTHER; note = 2'-fluoroadenosine-3'-phosphate
  modified_base 11: mod_base = OTHER; note = 2'-fluoroguanosine-3'-phosphate
  modified_base 12: mod_base = OTHER; note = 2'-O-methyladenosine-3'-phosphate
  modified_base 13: mod_base = OTHER; note = 2'-O-methyladenosine-3'-phosphate
  modified_base 14: mod_base = OTHER; note = 2'-O-methylcytidine-3'-phosphate
  modified_base 15: mod_base = OTHER; note = 2'-O-methyladenosine-3'-phosphate
  modified_base 16: mod_base = OTHER; note = 2'-O-methyluridine-3'-phosphate
  modified_base 17: mod_base = OTHER; note = 2'-O-methylguanosine-3'-phosphate
  modified_base 18: mod_base = OTHER; note = 2'-O-methyladenosine-3'-phosphate
  modified_base 19: mod_base = OTHER; note = 2'-O-methylcytidine-3'-phosphate
  modified_base 20: mod_base = OTHER; note = 2'-O-methylcytidine-3'-phosphate
  modified_base 21: mod_base = OTHER; note = 2'-O-methyluridine-3'-phosphate N-[tris(GalNAc-alkyl)-amidodecanoyl)]-4-hydroxyprolinol (Hyp-(GalNAc-alkyl)3)
ttgaatgtaagaacatgacct

SEQ ID NO: 3281 - RNA, 21 nt, synthetic construct
  source 1..21: mol_type = other RNA
  modified_base 1: mod_base = OTHER; note = 2'-O-methylcytidine-3'-phosphorothioate
  modified_base 2: mod_base = OTHER; note = 2'-O-methyladenosine-3'-phosphorothioate
  modified_base 3: mod_base = OTHER; note = 2'-O-methyluridine-3'-phosphate
  modified_base 4: mod_base = OTHER; note = 2'-O-methylguanosine-3'-phosphate
  modified_base 5: mod_base = OTHER; note = 2'-O-methyladenosine-3'-phosphate
  modified_base 6: mod_base = OTHER; note = 2'-O-methylcytidine-3'-phosphate
  modified_base 7: mod_base = OTHER; note = 2'-fluorocytidine-3'-phosphate
  modified_base 8: mod_base = OTHER; note = 2'-O-methyluridine-3'-phosphate
  modified_base 9: mod_base = OTHER; note = 2'-fluorocytidine-3'-phosphate
  modified_base 10: mod_base = OTHER; note = 2'-fluorocytidine-3'-phosphate
  modified_base 11: mod_base = OTHER; note = 2'-fluoroguanosine-3'-phosphate
  modified_base 12: mod_base = OTHER; note = 2'-O-methyluridine-3'-phosphate
  modified_base 13: mod_base = OTHER; note = 2'-O-methylguanosine-3'-phosphate
  modified_base 14: mod_base = OTHER; note = 2'-O-methyluridine-3'-phosphate
  modified_base 15: mod_base = OTHER; note = 2'-O-methyladenosine-3'-phosphate
  modified_base 16: mod_base = OTHER; note = 2'-O-methylguanosine-3'-phosphate
  modified_base 17: mod_base = OTHER; note = 2'-O-methyluridine-3'-phosphate
  modified_base 18: mod_base = OTHER; note = 2'-O-methylguanosine-3'-phosphate
  modified_base 19: mod_base = OTHER; note = 2'-O-methyluridine-3'-phosphate
  modified_base 20: mod_base = OTHER; note = 2'-O-methylcytidine-3'-phosphate
  modified_base 21: mod_base = OTHER; note = 2'-O-methyluridine-3'-phosphate N-[tris(GalNAc-alkyl)-amidodecanoyl)]-4-hydroxyprolinol (Hyp-(GalNAc-alkyl)3)
catgacctccgtgtagtgtct

SEQ ID NO: 3282 - RNA, 21 nt, synthetic construct
  source 1..21: mol_type = other RNA
  modified_base 1: mod_base = OTHER; note = 2'-O-methyladenosine-3'-phosphorothioate
  modified_base 2: mod_base = OTHER; note = 2'-O-methyluridine-3'-phosphorothioate
  modified_base 3: mod_base = OTHER; note = 2'-O-methylguanosine-3'-phosphate
  modified_base 4: mod_base = OTHER; note = 2'-O-methyladenosine-3'-phosphate
  modified_base 5: mod_base = OTHER; note = 2'-O-methylcytidine-3'-phosphate
  modified_base 6: mod_base = OTHER; note = 2'-O-methylcytidine-3'-phosphate
  modified_base 7: mod_base = OTHER; note = 2'-fluorouridine-3'-phosphate
  modified_base 8: mod_base = OTHER; note = 2'-O-methylcytidine-3'-phosphate
  modified_base 9: mod_base = OTHER; note = 2'-fluorocytidine-3'-phosphate
  modified_base 10: mod_base = OTHER; note = 2'-fluoroguanosine-3'-phosphate
  modified_base 11: mod_base = OTHER; note = 2'-fluorouridine-3'-phosphate
  modified_base 12: mod_base = OTHER; note = 2'-O-methylguanosine-3'-phosphate
  modified_base 13: mod_base = OTHER; note = 2'-O-methyluridine-3'-phosphate
  modified_base 14: mod_base = OTHER; note = 2'-O-methyladenosine-3'-phosphate
  modified_base 15: mod_base = OTHER; note = 2'-O-methylguanosine-3'-phosphate
  modified_base 16: mod_base = OTHER; note = 2'-O-methyluridine-3'-phosphate
  modified_base 17: mod_base = OTHER; note = 2'-O-methylguanosine-3'-phosphate
  modified_base 18: mod_base = OTHER; note = 2'-O-methyluridine-3'-phosphate
  modified_base 19: mod_base = OTHER; note = 2'-O-methylcytidine-3'-phosphate
  modified_base 20: mod_base = OTHER; note = 2'-O-methyluridine-3'-phosphate
  modified_base 21: mod_base = OTHER; note = 2'-O-methyluridine-3'-phosphate N-[tris(GalNAc-alkyl)-amidodecanoyl)]-4-hydroxyprolinol (Hyp-(GalNAc-alkyl)3)
atgacctccgtgtagtgtctt

SEQ ID NO: 3283 - RNA, 21 nt, synthetic construct
  source 1..21: mol_type = other RNA
  modified_base 1: mod_base = OTHER; note = 2'-O-methyluridine-3'-phosphorothioate
  modified_base 2: mod_base = OTHER; note = 2'-O-methyluridine-3'-phosphorothioate
  modified_base 3: mod_base = OTHER; note = 2'-O-methylcytidine-3'-phosphate
  modified_base 4: mod_base = OTHER; note = 2'-O-methylcytidine-3'-phosphate
  modified_base 5: mod_base = OTHER; note = 2'-O-methyladenosine-3'-phosphate
  modified_base 6: mod_base = OTHER; note = 2'-O-methylcytidine-3'-phosphate
  modified_base 7: mod_base = OTHER; note = 2'-fluoroadenosine-3'-phosphate
  modified_base 8: mod_base = OTHER; note = 2'-O-methylguanosine-3'-phosphate
  modified_base 9: mod_base = OTHER; note = 2'-fluoroadenosine-3'-phosphate
  modified_base 10: mod_base = OTHER; note = 2'-fluorouridine-3'-phosphate
  modified_base 11: mod_base = OTHER; note = 2'-fluoroguanosine-3'-phosphate
  modified_base 12: mod_base = OTHER; note = 2'-O-methylcytidine-3'-phosphate
  modified_base 13: mod_base = OTHER; note = 2'-O-methyluridine-3'-phosphate
  modified_base 14: mod_base = OTHER; note = 2'-O-methyluridine-3'-phosphate
  modified_base 15: mod_base = OTHER; note = 2'-O-methylguanosine-3'-phosphate
  modified_base 16: mod_base = OTHER; note = 2'-O-methyluridine-3'-phosphate
  modified_base 17: mod_base = OTHER; note = 2'-O-methylguanosine-3'-phosphate
  modified_base 18: mod_base = OTHER; note = 2'-O-methyladenosine-3'-phosphate
  modified_base 19: mod_base = OTHER; note = 2'-O-methyluridine-3'-phosphate
  modified_base 20: mod_base = OTHER; note = 2'-O-methyluridine-3'-phosphate
  modified_base 21: mod_base = OTHER; note = 2'-O-methyluridine-3'-phosphate N-[tris(GalNAc-alkyl)-amidodecanoyl)]-4-hydroxyprolinol (Hyp-(GalNAc-alkyl)3)
ttccacagatgcttgtgattt

SEQ ID NO: 3284 - RNA, 21 nt, synthetic construct
  source 1..21: mol_type = other RNA
  modified_base 1: mod_base = OTHER; note = 2'-O-methyluridine-3'-phosphorothioate
  modified_base 2: mod_base = OTHER; note = 2'-O-methylcytidine-3'-phosphorothioate
  modified_base 3: mod_base = OTHER; note = 2'-O-methylcytidine-3'-phosphate
  modified_base 4: mod_base = OTHER; note = 2'-O-methyladenosine-3'-phosphate
  modified_base 5: mod_base = OTHER; note = 2'-O-methylcytidine-3'-phosphate
  modified_base 6: mod_base = OTHER; note = 2'-O-methyladenosine-3'-phosphate
  modified_base 7: mod_base = OTHER; note = 2'-fluoroguanosine-3'-phosphate
  modified_base 8: mod_base = OTHER; note = 2'-O-methyladenosine-3'-phosphate
  modified_base 9: mod_base = OTHER; note = 2'-fluorouridine-3'-phosphate
  modified_base 10: mod_base = OTHER; note = 2'-fluoroguanosine-3'-phosphate
  modified_base 11: mod_base = OTHER; note = 2'-fluorocytidine-3'-phosphate
  modified_base 12: mod_base = OTHER; note = 2'-O-methyluridine-3'-phosphate
  modified_base 13: mod_base = OTHER; note = 2'-O-methyluridine-3'-phosphate
  modified_base 14: mod_base = OTHER; note = 2'-O-methylguanosine-3'-phosphate
  modified_base 15: mod_base = OTHER; note = 2'-O-methyluridine-3'-phosphate
  modified_base 16: mod_base = OTHER; note = 2'-O-methylguanosine-3'-phosphate
  modified_base 17: mod_base = OTHER; note = 2'-O-methyladenosine-3'-phosphate
  modified_base 18: mod_base = OTHER; note = 2'-O-methyluridine-3'-phosphate
  modified_base 19: mod_base = OTHER; note = 2'-O-methyluridine-3'-phosphate
  modified_base 20: mod_base = OTHER; note = 2'-O-methyluridine-3'-phosphate
  modified_base 21: mod_base = OTHER; note = 2'-O-methyluridine-3'-phosphate N-[tris(GalNAc-alkyl)-amidodecanoyl)]-4-hydroxyprolinol (Hyp-(GalNAc-alkyl)3)
tccacagatgcttgtgatttt

SEQ ID NO: 3285 - RNA, 21 nt, synthetic construct
  source 1..21: mol_type = other RNA
  modified_base 1: mod_base = OTHER; note = 2'-O-methylcytidine-3'-phosphorothioate
  modified_base 2: mod_base = OTHER; note = 2'-O-methylcytidine-3'-phosphorothioate
  modified_base 3: mod_base = OTHER; note = 2'-O-methyladenosine-3'-phosphate
  modified_base 4: mod_base = OTHER; note = 2'-O-methylcytidine-3'-phosphate
  modified_base 5: mod_base = OTHER; note = 2'-O-methyladenosine-3'-phosphate
  modified_base 6: mod_base = OTHER; note = 2'-O-methylguanosine-3'-phosphate
  modified_base 7: mod_base = OTHER; note = 2'-fluoroadenosine-3'-phosphate
  modified_base 8: mod_base = OTHER; note = 2'-O-methyluridine-3'-phosphate
  modified_base 9: mod_base = OTHER; note = 2'-fluoroguanosine-3'-phosphate
  modified_base 10: mod_base = OTHER; note = 2'-fluorocytidine-3'-phosphate
  modified_base 11: mod_base = OTHER; note = 2'-fluorouridine-3'-phosphate
  modified_base 12: mod_base = OTHER; note = 2'-O-methyluridine-3'-phosphate
  modified_base 13: mod_base = OTHER; note = 2'-O-methylguanosine-3'-phosphate
  modified_base 14: mod_base = OTHER; note = 2'-O-methyluridine-3'-phosphate
  modified_base 15: mod_base = OTHER; note = 2'-O-methylguanosine-3'-phosphate
  modified_base 16: mod_base = OTHER; note = 2'-O-methyladenosine-3'-phosphate
  modified_base 17: mod_base = OTHER; note = 2'-O-methyluridine-3'-phosphate
  modified_base 18: mod_base = OTHER; note = 2'-O-methyluridine-3'-phosphate
  modified_base 19: mod_base = OTHER; note = 2'-O-methyluridine-3'-phosphate
  modified_base 20: mod_base = OTHER; note = 2'-O-methyluridine-3'-phosphate
  modified_base 21: mod_base = OTHER; note = 2'-O-methyluridine-3'-phosphate N-[tris(GalNAc-alkyl)-amidodecanoyl)]-4-hydroxyprolinol (Hyp-(GalNAc-alkyl)3)
ccacagatgcttgtgattttt

SEQ ID NO: 3286 - RNA, 21 nt, synthetic construct
  source 1..21: mol_type = other RNA
  modified_base 1: mod_base = OTHER; note = 2'-O-methyladenosine-3'-phosphorothioate
  modified_base 2: mod_base = OTHER; note = 2'-O-methyladenosine-3'-phosphorothioate
  modified_base 3: mod_base = OTHER; note = 2'-O-methylcytidine-3'-phosphate
  modified_base 4: mod_base = OTHER; note = 2'-O-methylcytidine-3'-phosphate
  modified_base 5: mod_base = OTHER; note = 2'-O-methyluridine-3'-phosphate
  modified_base 6: mod_base = OTHER; note = 2'-O-methylguanosine-3'-phosphate
  modified_base 7: mod_base = OTHER; note = 2'-O-methylcytidine-3'-phosphate
  modified_base 8: mod_base = OTHER; note = 2'-O-methyladenosine-3'-phosphate
  modified_base 9: mod_base = OTHER; note = 2'-fluoroadenosine-3'-phosphate
  modified_base 10: mod_base = OTHER; note = 2'-fluoroadenosine-3'-phosphate
  modified_base 11: mod_base = OTHER; note = 2'-fluoroadenosine-3'-phosphate
  modified_base 12: mod_base = OTHER; note = 2'-O-methyladenosine-3'-phosphate
  modified_base 13: mod_base = OTHER; note = 2'-O-methyluridine-3'-phosphate
  modified_base 14: mod_base = OTHER; note = 2'-O-methyluridine-3'-phosphate
  modified_base 15: mod_base = OTHER; note = 2'-O-methylguanosine-3'-phosphate
  modified_base 16: mod_base = OTHER; note = 2'-O-methyladenosine-3'-phosphate
  modified_base 17: mod_base = OTHER; note = 2'-O-methylguanosine-3'-phosphate
  modified_base 18: mod_base = OTHER; note = 2'-O-methylcytidine-3'-phosphate
  modified_base 19: mod_base = OTHER; note = 2'-O-methyladenosine-3'-phosphate
  modified_base 20: mod_base = OTHER; note = 2'-O-methyladenosine-3'-phosphate
  modified_base 21: mod_base = OTHER; note = 2'-O-methyluridine-3'-phosphate N-[tris(GalNAc-alkyl)-amidodecanoyl)]-4-hydroxyprolinol (Hyp-(GalNAc-alkyl)3)
aacctgcaaaaattgagcaat

SEQ ID NO: 3287 - RNA, 21 nt, synthetic construct
  source 1..21: mol_type = other RNA
  modified_base 1: mod_base = OTHER; note = 2'-O-methyladenosine-3'-phosphorothioate
  modified_base 2: mod_base = OTHER; note = 2'-O-methylcytidine-3'-phosphorothioate
  modified_base 3: mod_base = OTHER; note = 2'-O-methylcytidine-3'-phosphate
  modified_base 4: mod_base = OTHER; note = 2'-O-methyluridine-3'-phosphate
  modified_base 5: mod_base = OTHER; note = 2'-O-methylguanosine-3'-phosphate
  modified_base 6: mod_base = OTHER; note = 2'-O-methylcytidine-3'-phosphate
  modified_base 7: mod_base = OTHER; note = 2'-O-methyladenosine-3'-phosphate
  modified_base 8: mod_base = OTHER; note = 2'-O-methyladenosine-3'-phosphate
  modified_base 9: mod_base = OTHER; note = 2'-fluoroadenosine-3'-phosphate
  modified_base 10: mod_base = OTHER; note = 2'-fluoroadenosine-3'-phosphate
  modified_base 11: mod_base = OTHER; note = 2'-fluoroadenosine-3'-phosphate
  modified_base 12: mod_base = OTHER; note = 2'-O-methyluridine-3'-phosphate
  modified_base 13: mod_base = OTHER; note = 2'-O-methyluridine-3'-phosphate
  modified_base 14: mod_base = OTHER; note = 2'-O-methylguanosine-3'-phosphate
  modified_base 15: mod_base = OTHER; note = 2'-O-methyladenosine-3'-phosphate
  modified_base 16: mod_base = OTHER; note = 2'-O-methylguanosine-3'-phosphate
  modified_base 17: mod_base = OTHER; note = 2'-O-methylcytidine-3'-phosphate
  modified_base 18: mod_base = OTHER; note = 2'-O-methyladenosine-3'-phosphate
  modified_base 19: mod_base = OTHER; note = 2'-O-methyladenosine-3'-phosphate
  modified_base 20: mod_base = OTHER; note = 2'-O-methyluridine-3'-phosphate
  modified_base 21: mod_base = OTHER; note = 2'-O-methyluridine-3'-phosphate N-[tris(GalNAc-alkyl)-amidodecanoyl)]-4-hydroxyprolinol (Hyp-(GalNAc-alkyl)3)
acctgcaaaaattgagcaatt

SEQ ID NO: 3288 - RNA, 21 nt, synthetic construct
  source 1..21: mol_type = other RNA
  modified_base 1: mod_base = OTHER; note = 2'-O-methylcytidine-3'-phosphorothioate
  modified_base 2: mod_base = OTHER; note = 2'-O-methylcytidine-3'-phosphorothioate
  modified_base 3: mod_base = OTHER; note = 2'-O-methyluridine-3'-phosphate
  modified_base 4: mod_base = OTHER; note = 2'-O-methylguanosine-3'-phosphate
  modified_base 5: mod_base = OTHER; note = 2'-O-methylcytidine-3'-phosphate
  modified_base 6: mod_base = OTHER; note = 2'-O-methyladenosine-3'-phosphate
  modified_base 7: mod_base = OTHER; note = 2'-O-methyladenosine-3'-phosphate
  modified_base 8: mod_base = OTHER; note = 2'-O-methyladenosine-3'-phosphate
  modified_base 9: mod_base = OTHER; note = 2'-fluoroadenosine-3'-phosphate
  modified_base 10: mod_base = OTHER; note = 2'-fluoroadenosine-3'-phosphate
  modified_base 11: mod_base = OTHER; note = 2'-fluorouridine-3'-phosphate
  modified_base 12: mod_base = OTHER; note = 2'-O-methyluridine-3'-phosphate
  modified_base 13: mod_base = OTHER; note = 2'-O-methylguanosine-3'-phosphate
  modified_base 14: mod_base = OTHER; note = 2'-O-methyladenosine-3'-phosphate
  modified_base 15: mod_base = OTHER; note = 2'-O-methylguanosine-3'-phosphate
  modified_base 16: mod_base = OTHER; note = 2'-O-methylcytidine-3'-phosphate
  modified_base 17: mod_base = OTHER; note = 2'-O-methyladenosine-3'-phosphate
  modified_base 18: mod_base = OTHER; note = 2'-O-methyladenosine-3'-phosphate
  modified_base 19: mod_base = OTHER; note = 2'-O-methyluridine-3'-phosphate
  modified_base 20: mod_base = OTHER; note = 2'-O-methylguanosine-3'-phosphate
  modified_base 21: mod_base = OTHER; note = 2'-O-methyluridine-3'-phosphate N-[tris(GalNAc-alkyl)-amidodecanoyl)]-4-hydroxyprolinol (Hyp-(GalNAc-alkyl)3)
cctgcaaaaattgagcaatgt

SEQ ID NO: 3289 - RNA, 21 nt, synthetic construct
  source 1..21: mol_type = other RNA
  modified_base 1: mod_base = OTHER; note = 2'-O-methylcytidine-3'-phosphorothioate
  modified_base 2: mod_base = OTHER; note = 2'-O-methyluridine-3'-phosphorothioate
  modified_base 3: mod_base = OTHER; note = 2'-O-methylguanosine-3'-phosphate
  modified_base 4: mod_base = OTHER; note = 2'-O-methylcytidine-3'-phosphate
  modified_base 5: mod_base = OTHER; note = 2'-O-methyladenosine-3'-phosphate
  modified_base 6: mod_base = OTHER; note = 2'-O-methyladenosine-3'-phosphate
  modified_base 7: mod_base = OTHER; note = 2'-O-methyladenosine-3'-phosphate
  modified_base 8: mod_base = OTHER; note = 2'-O-methyladenosine-3'-phosphate
  modified_base 9: mod_base = OTHER; note = 2'-fluoroadenosine-3'-phosphate
  modified_base 10: mod_base = OTHER; note = 2'-fluorouridine-3'-phosphate
  modified_base 11: mod_base = OTHER; note = 2'-fluorouridine-3'-phosphate
  modified_base 12: mod_base = OTHER; note = 2'-O-methylguanosine-3'-phosphate
  modified_base 13: mod_base = OTHER; note = 2'-O-methyladenosine-3'-phosphate
  modified_base 14: mod_base = OTHER; note = 2'-O-methylguanosine-3'-phosphate
  modified_base 15: mod_base = OTHER; note = 2'-O-methylcytidine-3'-phosphate
  modified_base 16: mod_base = OTHER; note = 2'-O-methyladenosine-3'-phosphate
  modified_base 17: mod_base = OTHER; note = 2'-O-methyladenosine-3'-phosphate
  modified_base 18: mod_base = OTHER; note = 2'-O-methyluridine-3'-phosphate
  modified_base 19: mod_base = OTHER; note = 2'-O-methylguanosine-3'-phosphate
  modified_base 20: mod_base = OTHER; note = 2'-O-methyladenosine-3'-phosphate
  modified_base 21: mod_base = OTHER; note = 2'-O-methyluridine-3'-phosphate N-[tris(GalNAc-alkyl)-amidodecanoyl)]-4-hydroxyprolinol (Hyp-(GalNAc-alkyl)3)
ctgcaaaaattgagcaatgat

SEQ ID NO: 3290 - RNA, 21 nt, synthetic construct
  source 1..21: mol_type = other RNA
  modified_base 1: mod_base = OTHER; note = 2'-O-methylguanosine-3'-phosphorothioate
  modified_base 2: mod_base = OTHER; note = 2'-O-methylcytidine-3'-phosphorothioate
  modified_base 3: mod_base = OTHER; note = 2'-O-methyluridine-3'-phosphate
  modified_base 4: mod_base = OTHER; note = 2'-O-methyluridine-3'-phosphate
  modified_base 5: mod_base = OTHER; note = 2'-O-methylguanosine-3'-phosphate
  modified_base 6: mod_base = OTHER; note = 2'-O-methyluridine-3'-phosphate
  modified_base 7: mod_base = OTHER; note = 2'-O-methyluridine-3'-phosphate
  modified_base 8: mod_base = OTHER; note = 2'-O-methyluridine-3'-phosphate
  modified_base 9: mod_base = OTHER; note = 2'-fluoroguanosine-3'-phosphate
  modified_base 10: mod_base = OTHER; note = 2'-fluorouridine-3'-phosphate
  modified_base 11: mod_base = OTHER; note = 2'-fluoroguanosine-3'-phosphate
  modified_base 12: mod_base = OTHER; note = 2'-O-methyladenosine-3'-phosphate
  modified_base 13: mod_base = OTHER; note = 2'-O-methyladenosine-3'-phosphate
  modified_base 14: mod_base = OTHER; note = 2'-O-methyladenosine-3'-phosphate
  modified_base 15: mod_base = OTHER; note = 2'-O-methylcytidine-3'-phosphate
  modified_base 16: mod_base = OTHER; note = 2'-O-methyladenosine-3'-phosphate
  modified_base 17: mod_base = OTHER; note = 2'-O-methyladenosine-3'-phosphate
  modified_base 18: mod_base = OTHER; note = 2'-O-methyladenosine-3'-phosphate
  modified_base 19: mod_base = OTHER; note = 2'-O-methyladenosine-3'-phosphate
  modified_base 20: mod_base = OTHER; note = 2'-O-methyladenosine-3'-phosphate
  modified_base 21: mod_base = OTHER; note = 2'-O-methyluridine-3'-phosphate N-[tris(GalNAc-alkyl)-amidodecanoyl)]-4-hydroxyprolinol (Hyp-(GalNAc-alkyl)3)
gcttgtttgtgaaacaaaaat

SEQ ID NO: 3291 - RNA, 21 nt, synthetic construct
  source 1..21: mol_type = other RNA
  modified_base 1: mod_base = OTHER; note = 2'-O-methylcytidine-3'-phosphorothioate
  modified_base 2: mod_base = OTHER; note = 2'-O-methylcytidine-3'-phosphorothioate
  modified_base 3: mod_base = OTHER; note = 2'-O-methylguanosine-3'-phosphate
  modified_base 4: mod_base = OTHER; note = 2'-O-methylguanosine-3'-phosphate
  modified_base 5: mod_base = OTHER; note = 2'-O-methylguanosine-3'-phosphate
  modified_base 6: mod_base = OTHER; note = 2'-O-methyluridine-3'-phosphate
  modified_base 7: mod_base = OTHER; note = 2'-fluoroguanosine-3'-phosphate
  modified_base 8: mod_base = OTHER; note = 2'-O-methyluridine-3'-phosphate
  modified_base 9: mod_base = OTHER; note = 2'-fluoroadenosine-3'-phosphate
  modified_base 10: mod_base = OTHER; note = 2'-fluorocytidine-3'-phosphate
  modified_base 11: mod_base = OTHER; note = 2'-fluoroadenosine-3'-phosphate
  modified_base 12: mod_base = OTHER; note = 2'-O-methyluridine-3'-phosphate
  modified_base 13: mod_base = OTHER; note = 2'-O-methyladenosine-3'-phosphate
  modified_base 14: mod_base = OTHER; note = 2'-O-methylcytidine-3'-phosphate
  modified_base 15: mod_base = OTHER; note = 2'-O-methyladenosine-3'-phosphate
  modified_base 16: mod_base = OTHER; note = 2'-O-methylcytidine-3'-phosphate
  modified_base 17: mod_base = OTHER; note = 2'-O-methylcytidine-3'-phosphate
  modified_base 18: mod_base = OTHER; note = 2'-O-methylcytidine-3'-phosphate
  modified_base 19: mod_base = OTHER; note = 2'-O-methylcytidine-3'-phosphate
  modified_base 20: mod_base = OTHER; note = 2'-O-methyluridine-3'-phosphate
  modified_base 21: mod_base = OTHER; note = 2'-O-methyluridine-3'-phosphate N-[tris(GalNAc-alkyl)-amidodecanoyl)]-4-hydroxyprolinol (Hyp-(GalNAc-alkyl)3)
ccgggtgtacatacacccctt

SEQ ID NO: 3292 - RNA, 21 nt, synthetic construct
  source 1..21: mol_type = other RNA
  modified_base 1: mod_base = OTHER; note = 2'-O-methylcytidine-3'-phosphorothioate
  modified_base 2: mod_base = OTHER; note = 2'-O-methylcytidine-3'-phosphorothioate
  modified_base 3: mod_base = OTHER; note = 2'-O-methylguanosine-3'-phosphate
  modified_base 4: mod_base = OTHER; note = 2'-O-methylguanosine-3'-phosphate
  modified_base 5: mod_base = OTHER; note = 2'-O-methylguanosine-3'-phosphate
  modified_base 6: mod_base = OTHER; note = 2'-O-methyluridine-3'-phosphate
  modified_base 7: mod_base = OTHER; note = 2'-O-methylguanosine-3'-phosphate
  modified_base 8: mod_base = OTHER; note = 2'-O-methyluridine-3'-phosphate
  modified_base 9: mod_base = OTHER; note = 2'-fluoroadenosine-3'-phosphate
  modified_base 10: mod_base = OTHER; note = 2'-fluorocytidine-3'-phosphate
  modified_base 11: mod_base = OTHER; note = 2'-fluoroadenosine-3'-phosphate
  modified_base 12: mod_base = OTHER; note = 2'-O-methyluridine-3'-phosphate
  modified_base 13: mod_base = OTHER; note = 2'-O-methyladenosine-3'-phosphate
  modified_base 14: mod_base = OTHER; note = 2'-O-methylcytidine-3'-phosphate
  modified_base 15: mod_base = OTHER; note = 2'-O-methyladenosine-3'-phosphate
  modified_base 16: mod_base = OTHER; note = 2'-O-methylcytidine-3'-phosphate
  modified_base 17: mod_base = OTHER; note = 2'-O-methylcytidine-3'-phosphate
  modified_base 18: mod_base = OTHER; note = 2'-O-methylcytidine-3'-phosphate
  modified_base 19: mod_base = OTHER; note = 2'-O-methylcytidine-3'-phosphate
  modified_base 20: mod_base = OTHER; note = 2'-O-methyluridine-3'-phosphate
  modified_base 21: mod_base = OTHER; note = 2'-O-methyluridine-3'-phosphate N-[tris(GalNAc-alkyl)-amidodecanoyl)]-4-hydroxyprolinol (Hyp-(GalNAc-alkyl)3)
ccgggtgtacatacacccctt

SEQ ID NO: 3293 - RNA, 21 nt, synthetic construct
  source 1..21: mol_type = other RNA
  modified_base 1: mod_base = OTHER; note = 2'-O-methylcytidine-3'-phosphorothioate
  modified_base 2: mod_base = OTHER; note = 2'-O-methylguanosine-3'-phosphorothioate
  modified_base 3: mod_base = OTHER; note = 2'-O-methylguanosine-3'-phosphate
  modified_base 4: mod_base = OTHER; note = 2'-O-methylguanosine-3'-phosphate
  modified_base 5: mod_base = OTHER; note = 2'-O-methyluridine-3'-phosphate
  modified_base 6: mod_base = OTHER; note = 2'-O-methylguanosine-3'-phosphate
  modified_base 7: mod_base = OTHER; note = 2'-fluorouridine-3'-phosphate
  modified_base 8: mod_base = OTHER; note = 2'-O-methyladenosine-3'-phosphate
  modified_base 9: mod_base = OTHER; note = 2'-fluorocytidine-3'-phosphate
  modified_base 10: mod_base = OTHER; note = 2'-fluoroadenosine-3'-phosphate
  modified_base 11: mod_base = OTHER; note = 2'-fluorouridine-3'-phosphate
  modified_base 12: mod_base = OTHER; note = 2'-O-methyladenosine-3'-phosphate
  modified_base 13: mod_base = OTHER; note = 2'-O-methylcytidine-3'-phosphate
  modified_base 14: mod_base = OTHER; note = 2'-O-methyladenosine-3'-phosphate
  modified_base 15: mod_base = OTHER; note = 2'-O-methylcytidine-3'-phosphate
  modified_base 16: mod_base = OTHER; note = 2'-O-methylcytidine-3'-phosphate
  modified_base 17: mod_base = OTHER; note = 2'-O-methylcytidine-3'-phosphate
  modified_base 18: mod_base = OTHER; note = 2'-O-methylcytidine-3'-phosphate
  modified_base 19: mod_base = OTHER; note = 2'-O-methyluridine-3'-phosphate
  modified_base 20: mod_base = OTHER; note = 2'-O-methyluridine-3'-phosphate
  modified_base 21: mod_base = OTHER; note = 2'-O-methyluridine-3'-phosphate N-[tris(GalNAc-alkyl)-amidodecanoyl)]-4-hydroxyprolinol (Hyp-(GalNAc-alkyl)3)
cgggtgtacatacaccccttt

SEQ ID NO: 3294 - RNA, 21 nt, synthetic construct
  source 1..21: mol_type = other RNA
  modified_base 1: mod_base = OTHER; note = 2'-O-methylcytidine-3'-phosphorothioate
  modified_base 2: mod_base = OTHER; note = 2'-O-methylguanosine-3'-phosphorothioate
  modified_base 3: mod_base = OTHER; note = 2'-O-methylguanosine-3'-phosphate
  modified_base 4: mod_base = OTHER; note = 2'-O-methylguanosine-3'-phosphate
  modified_base 5: mod_base = OTHER; note = 2'-O-methyluridine-3'-phosphate
  modified_base 6: mod_base = OTHER; note = 2'-O-methylguanosine-3'-phosphate
  modified_base 7: mod_base = OTHER; note = 2'-O-methyluridine-3'-phosphate
  modified_base 8: mod_base = OTHER; note = 2'-O-methyladenosine-3'-phosphate
  modified_base 9: mod_base = OTHER; note = 2'-fluorocytidine-3'-phosphate
  modified_base 10: mod_base = OTHER; note = 2'-fluoroadenosine-3'-phosphate
  modified_base 11: mod_base = OTHER; note = 2'-fluorouridine-3'-phosphate
  modified_base 12: mod_base = OTHER; note = 2'-O-methyladenosine-3'-phosphate
  modified_base 13: mod_base = OTHER; note = 2'-O-methylcytidine-3'-phosphate
  modified_base 14: mod_base = OTHER; note = 2'-O-methyladenosine-3'-phosphate
  modified_base 15: mod_base = OTHER; note = 2'-O-methylcytidine-3'-phosphate
  modified_base 16: mod_base = OTHER; note = 2'-O-methylcytidine-3'-phosphate
  modified_base 17: mod_base = OTHER; note = 2'-O-methylcytidine-3'-phosphate
  modified_base 18: mod_base = OTHER; note = 2'-O-methylcytidine-3'-phosphate
  modified_base 19: mod_base = OTHER; note = 2'-O-methyluridine-3'-phosphate
  modified_base 20: mod_base = OTHER; note = 2'-O-methyluridine-3'-phosphate
  modified_base 21: mod_base = OTHER; note = 2'-O-methyluridine-3'-phosphate N-[tris(GalNAc-alkyl)-amidodecanoyl)]-4-hydroxyprolinol (Hyp-(GalNAc-alkyl)3)
cgggtgtacatacaccccttt

SEQ ID NO: 3295 - RNA, 21 nt, synthetic construct
  source 1..21: mol_type = other RNA
  modified_base 1: mod_base = OTHER; note = 2'-O-methylguanosine-3'-phosphorothioate
  modified_base 2: mod_base = OTHER; note = 2'-O-methylguanosine-3'-phosphorothioate
  modified_base 3: mod_base = OTHER; note = 2'-O-methylguanosine-3'-phosphate
  modified_base 4: mod_base = OTHER; note = 2'-O-methyluridine-3'-phosphate
  modified_base 5: mod_base = OTHER; note = 2'-O-methylguanosine-3'-phosphate
  modified_base 6: mod_base = OTHER; note = 2'-O-methyluridine-3'-phosphate
  modified_base 7: mod_base = OTHER; note = 2'-fluoroadenosine-3'-phosphate
  modified_base 8: mod_base = OTHER; note = 2'-O-methylcytidine-3'-phosphate
  modified_base 9: mod_base = OTHER; note = 2'-fluoroadenosine-3'-phosphate
  modified_base 10: mod_base = OTHER; note = 2'-fluorouridine-3'-phosphate
  modified_base 11: mod_base = OTHER; note = 2'-fluoroadenosine-3'-phosphate
  modified_base 12: mod_base = OTHER; note = 2'-O-methylcytidine-3'-phosphate
  modified_base 13: mod_base = OTHER; note = 2'-O-methyladenosine-3'-phosphate
  modified_base 14: mod_base = OTHER; note = 2'-O-methylcytidine-3'-phosphate
  modified_base 15: mod_base = OTHER; note = 2'-O-methylcytidine-3'-phosphate
  modified_base 16: mod_base = OTHER; note = 2'-O-methylcytidine-3'-phosphate
  modified_base 17: mod_base = OTHER; note = 2'-O-methylcytidine-3'-phosphate
  modified_base 18: mod_base = OTHER; note = 2'-O-methyluridine-3'-phosphate
  modified_base 19: mod_base = OTHER; note = 2'-O-methyluridine-3'-phosphate
  modified_base 20: mod_base = OTHER; note = 2'-O-methylcytidine-3'-phosphate
  modified_base 21: mod_base = OTHER; note = 2'-O-methyluridine-3'-phosphate N-[tris(GalNAc-alkyl)-amidodecanoyl)]-4-hydroxyprolinol (Hyp-(GalNAc-alkyl)3)
gggtgtacatacaccccttct

SEQ ID NO: 3296 - RNA, 21 nt, synthetic construct
  source 1..21: mol_type = other RNA
  modified_base 1: mod_base = OTHER; note = 2'-O-methylguanosine-3'-phosphorothioate
  modified_base 2: mod_base = OTHER; note = 2'-O-methylguanosine-3'-phosphorothioate
  modified_base 3: mod_base = OTHER; note = 2'-O-methylguanosine-3'-phosphate
  modified_base 4: mod_base = OTHER; note = 2'-O-methyluridine-3'-phosphate
  modified_base 5: mod_base = OTHER; note = 2'-O-methylguanosine-3'-phosphate
  modified_base 6: mod_base = OTHER; note = 2'-O-methyluridine-3'-phosphate
  modified_base 7: mod_base = OTHER; note = 2'-O-methyladenosine-3'-phosphate
  modified_base 8: mod_base = OTHER; note = 2'-O-methylcytidine-3'-phosphate
  modified_base 9: mod_base = OTHER; note = 2'-fluoroadenosine-3'-phosphate
  modified_base 10: mod_base = OTHER; note = 2'-fluorouridine-3'-phosphate
  modified_base 11: mod_base = OTHER; note = 2'-fluoroadenosine-3'-phosphate
  modified_base 12: mod_base = OTHER; note = 2'-O-methylcytidine-3'-phosphate
  modified_base 13: mod_base = OTHER; note = 2'-O-methyladenosine-3'-phosphate
  modified_base 14: mod_base = OTHER; note = 2'-O-methylcytidine-3'-phosphate
  modified_base 15: mod_base = OTHER; note = 2'-O-methylcytidine-3'-phosphate
  modified_base 16: mod_base = OTHER; note = 2'-O-methylcytidine-3'-phosphate
  modified_base 17: mod_base = OTHER; note = 2'-O-methylcytidine-3'-phosphate
  modified_base 18: mod_base = OTHER; note = 2'-O-methyluridine-3'-phosphate
  modified_base 19: mod_base = OTHER; note = 2'-O-methyluridine-3'-phosphate
  modified_base 20: mod_base = OTHER; note = 2'-O-methylcytidine-3'-phosphate
  modified_base 21: mod_base = OTHER; note = 2'-O-methyluridine-3'-phosphate N-[tris(GalNAc-alkyl)-amidodecanoyl)]-4-hydroxyprolinol (Hyp-(GalNAc-alkyl)3)
gggtgtacatacaccccttct

SEQ ID NO: 3297 - RNA, 21 nt, synthetic construct
  source 1..21: mol_type = other RNA
  modified_base 1: mod_base = OTHER; note = 2'-O-methylguanosine-3'-phosphorothioate
  modified_base 2: mod_base = OTHER; note = 2'-O-methylguanosine-3'-phosphorothioate
  modified_base 3: mod_base = OTHER; note = 2'-O-methyluridine-3'-phosphate
  modified_base 4: mod_base = OTHER; note = 2'-O-methylguanosine-3'-phosphate
  modified_base 5: mod_base = OTHER; note = 2'-O-methyluridine-3'-phosphate
  modified_base 6: mod_base = OTHER; note = 2'-O-methyladenosine-3'-phosphate
  modified_base 7: mod_base = OTHER; note = 2'-fluorocytidine-3'-phosphate
  modified_base 8: mod_base = OTHER; note = 2'-O-methyladenosine-3'-phosphate
  modified_base 9: mod_base = OTHER; note = 2'-fluorouridine-3'-phosphate
  modified_base 10: mod_base = OTHER; note = 2'-fluoroadenosine-3'-phosphate
  modified_base 11: mod_base = OTHER; note = 2'-fluorocytidine-3'-phosphate
  modified_base 12: mod_base = OTHER; note = 2'-O-methyladenosine-3'-phosphate
  modified_base 13: mod_base = OTHER; note = 2'-O-methylcytidine-3'-phosphate
  modified_base 14: mod_base = OTHER; note = 2'-O-methylcytidine-3'-phosphate
  modified_base 15: mod_base = OTHER; note = 2'-O-methylcytidine-3'-phosphate
  modified_base 16: mod_base = OTHER; note = 2'-O-methylcytidine-3'-phosphate
  modified_base 17: mod_base = OTHER; note = 2'-O-methyluridine-3'-phosphate
  modified_base 18: mod_base = OTHER; note = 2'-O-methyluridine-3'-phosphate
  modified_base 19: mod_base = OTHER; note = 2'-O-methylcytidine-3'-phosphate
  modified_base 20: mod_base = OTHER; note = 2'-O-methylcytidine-3'-phosphate
  modified_base 21: mod_base = OTHER; note = 2'-O-methyluridine-3'-phosphate N-[tris(GalNAc-alkyl)-amidodecanoyl)]-4-hydroxyprolinol (Hyp-(GalNAc-alkyl)3)
ggtgtacatacaccccttcct

SEQ ID NO: 3298 - RNA, 21 nt, synthetic construct
  source 1..21: mol_type = other RNA
  modified_base 1: mod_base = OTHER; note = 2'-O-methylguanosine-3'-phosphorothioate
  modified_base 2: mod_base = OTHER; note = 2'-O-methylguanosine-3'-phosphorothioate
  modified_base 3: mod_base = OTHER; note = 2'-O-methyluridine-3'-phosphate
  modified_base 4: mod_base = OTHER; note = 2'-O-methylguanosine-3'-phosphate
  modified_base 5: mod_base = OTHER; note = 2'-O-methyluridine-3'-phosphate
  modified_base 6: mod_base = OTHER; note = 2'-O-methyladenosine-3'-phosphate
  modified_base 7: mod_base = OTHER; note = 2'-O-methylcytidine-3'-phosphate
  modified_base 8: mod_base = OTHER; note = 2'-O-methyladenosine-3'-phosphate
  modified_base 9: mod_base = OTHER; note = 2'-fluorouridine-3'-phosphate
  modified_base 10: mod_base = OTHER; note = 2'-fluoroadenosine-3'-phosphate
  modified_base 11: mod_base = OTHER; note = 2'-fluorocytidine-3'-phosphate
  modified_base 12: mod_base = OTHER; note = 2'-O-methyladenosine-3'-phosphate
  modified_base 13: mod_base = OTHER; note = 2'-O-methylcytidine-3'-phosphate
  modified_base 14: mod_base = OTHER; note = 2'-O-methylcytidine-3'-phosphate
  modified_base 15: mod_base = OTHER; note = 2'-O-methylcytidine-3'-phosphate
  modified_base 16: mod_base = OTHER; note = 2'-O-methylcytidine-3'-phosphate
  modified_base 17: mod_base = OTHER; note = 2'-O-methyluridine-3'-phosphate
  modified_base 18: mod_base = OTHER; note = 2'-O-methyluridine-3'-phosphate
  modified_base 19: mod_base = OTHER; note = 2'-O-methylcytidine-3'-phosphate
  modified_base 20: mod_base = OTHER; note = 2'-O-methylcytidine-3'-phosphate
  modified_base 21: mod_base = OTHER; note = 2'-O-methyluridine-3'-phosphate N-[tris(GalNAc-alkyl)-amidodecanoyl)]-4-hydroxyprolinol (Hyp-(GalNAc-alkyl)3)
ggtgtacatacaccccttcct

SEQ ID NO: 3299 - RNA, 21 nt, synthetic construct
  source 1..21: mol_type = other RNA
  modified_base 1: mod_base = OTHER; note = 2'-O-methylguanosine-3'-phosphorothioate
  modified_base 2: mod_base = OTHER; note = 2'-O-methyluridine-3'-phosphorothioate
  modified_base 3: mod_base = OTHER; note = 2'-O-methylguanosine-3'-phosphate
  modified_base 4: mod_base = OTHER; note = 2'-O-methyluridine-3'-phosphate
  modified_base 5: mod_base = OTHER; note = 2'-O-methyladenosine-3'-phosphate
  modified_base 6: mod_base = OTHER; note = 2'-O-methylcytidine-3'-phosphate
  modified_base 7: mod_base = OTHER; note = 2'-fluoroadenosine-3'-phosphate
  modified_base 8: mod_base = OTHER; note = 2'-O-methyluridine-3'-phosphate
  modified_base 9: mod_base = OTHER; note = 2'-fluoroadenosine-3'-phosphate
  modified_base 10: mod_base = OTHER; note = 2'-fluorocytidine-3'-phosphate
  modified_base 11: mod_base = OTHER; note = 2'-fluoroadenosine-3'-phosphate
  modified_base 12: mod_base = OTHER; note = 2'-O-methylcytidine-3'-phosphate
  modified_base 13: mod_base = OTHER; note = 2'-O-methylcytidine-3'-phosphate
  modified_base 14: mod_base = OTHER; note = 2'-O-methylcytidine-3'-phosphate
  modified_base 15: mod_base = OTHER; note = 2'-O-methylcytidine-3'-phosphate
  modified_base 16: mod_base = OTHER; note = 2'-O-methyluridine-3'-phosphate
  modified_base 17: mod_base = OTHER; note = 2'-O-methyluridine-3'-phosphate
  modified_base 18: mod_base = OTHER; note = 2'-O-methylcytidine-3'-phosphate
  modified_base 19: mod_base = OTHER; note = 2'-O-methylcytidine-3'-phosphate
  modified_base 20: mod_base = OTHER; note = 2'-O-methyladenosine-3'-phosphate
  modified_base 21: mod_base = OTHER; note = 2'-O-methyluridine-3'-phosphate N-[tris(GalNAc-alkyl)-amidodecanoyl)]-4-hydroxyprolinol (Hyp-(GalNAc-alkyl)3)
gtgtacatacaccccttccat

SEQ ID NO: 3300 - RNA, 21 nt, synthetic construct
  source 1..21: mol_type = other RNA
  modified_base 1: mod_base = OTHER; note = 2'-O-methylguanosine-3'-phosphorothioate
  modified_base 2: mod_base = OTHER; note = 2'-O-methyluridine-3'-phosphorothioate
  modified_base 3: mod_base = OTHER; note = 2'-O-methylguanosine-3'-phosphate
  modified_base 4: mod_base = OTHER; note = 2'-O-methyluridine-3'-phosphate
  modified_base 5: mod_base = OTHER; note = 2'-O-methyladenosine-3'-phosphate
  modified_base 6: mod_base = OTHER; note = 2'-O-methylcytidine-3'-phosphate
  modified_base 7: mod_base = OTHER; note = 2'-O-methyladenosine-3'-phosphate
  modified_base 8: mod_base = OTHER; note = 2'-O-methyluridine-3'-phosphate
  modified_base 9: mod_base = OTHER; note = 2'-fluoroadenosine-3'-phosphate
  modified_base 10: mod_base = OTHER; note = 2'-fluorocytidine-3'-phosphate
  modified_base 11: mod_base = OTHER; note = 2'-fluoroadenosine-3'-phosphate
  modified_base 12: mod_base = OTHER; note = 2'-O-methylcytidine-3'-phosphate
  modified_base 13: mod_base = OTHER; note = 2'-O-methylcytidine-3'-phosphate
  modified_base 14: mod_base = OTHER; note = 2'-O-methylcytidine-3'-phosphate
  modified_base 15: mod_base = OTHER; note = 2'-O-methylcytidine-3'-phosphate
  modified_base 16: mod_base = OTHER; note = 2'-O-methyluridine-3'-phosphate
  modified_base 17: mod_base = OTHER; note = 2'-O-methyluridine-3'-phosphate
  modified_base 18: mod_base = OTHER; note = 2'-O-methylcytidine-3'-phosphate
  modified_base 19: mod_base = OTHER; note = 2'-O-methylcytidine-3'-phosphate
  modified_base 20: mod_base = OTHER; note = 2'-O-methyladenosine-3'-phosphate
  modified_base 21: mod_base = OTHER; note = 2'-O-methyluridine-3'-phosphate N-[tris(GalNAc-alkyl)-amidodecanoyl)]-4-hydroxyprolinol (Hyp-(GalNAc-alkyl)3)
gtgtacatacaccccttccat

SEQ ID NO: 3301 - RNA, 21 nt, synthetic construct
  source 1..21: mol_type = other RNA
  modified_base 1: mod_base = OTHER; note = 2'-O-methyluridine-3'-phosphorothioate
  modified_base 2: mod_base = OTHER; note = 2'-O-methylguanosine-3'-phosphorothioate
  modified_base 3: mod_base = OTHER; note = 2'-O-methyluridine-3'-phosphate
  modified_base 4: mod_base = OTHER; note = 2'-O-methyladenosine-3'-phosphate
  modified_base 5: mod_base = OTHER; note = 2'-O-methylcytidine-3'-phosphate
  modified_base 6: mod_base = OTHER; note = 2'-O-methyladenosine-3'-phosphate
  modified_base 7: mod_base = OTHER; note = 2'-fluorouridine-3'-phosphate
  modified_base 8: mod_base = OTHER; note = 2'-O-methyladenosine-3'-phosphate
  modified_base 9: mod_base = OTHER; note = 2'-fluorocytidine-3'-phosphate
  modified_base 10: mod_base = OTHER; note = 2'-fluoroadenosine-3'-phosphate
  modified_base 11: mod_base = OTHER; note = 2'-fluorocytidine-3'-phosphate
  modified_base 12: mod_base = OTHER; note = 2'-O-methylcytidine-3'-phosphate
  modified_base 13: mod_base = OTHER; note = 2'-O-methylcytidine-3'-phosphate
  modified_base 14: mod_base = OTHER; note = 2'-O-methylcytidine-3'-phosphate
  modified_base 15: mod_base = OTHER; note = 2'-O-methyluridine-3'-phosphate
  modified_base 16: mod_base = OTHER; note = 2'-O-methyluridine-3'-phosphate
  modified_base 17: mod_base = OTHER; note = 2'-O-methylcytidine-3'-phosphate
  modified_base 18: mod_base = OTHER; note = 2'-O-methylcytidine-3'-phosphate
  modified_base 19: mod_base = OTHER; note = 2'-O-methyladenosine-3'-phosphate
  modified_base 20: mod_base = OTHER; note = 2'-O-methylcytidine-3'-phosphate
  modified_base 21: mod_base = OTHER; note = 2'-O-methyluridine-3'-phosphate N-[tris(GalNAc-alkyl)-amidodecanoyl)]-4-hydroxyprolinol (Hyp-(GalNAc-alkyl)3)
tgtacatacaccccttccact

SEQ ID NO: 3302 - RNA, 21 nt, synthetic construct
  source 1..21: mol_type = other RNA
  modified_base 1: mod_base = OTHER; note = 2'-O-methyluridine-3'-phosphorothioate
  modified_base 2: mod_base = OTHER; note = 2'-O-methylguanosine-3'-phosphorothioate
  modified_base 3: mod_base = OTHER; note = 2'-O-methyluridine-3'-phosphate
  modified_base 4: mod_base = OTHER; note = 2'-O-methyladenosine-3'-phosphate
  modified_base 5: mod_base = OTHER; note = 2'-O-methylcytidine-3'-phosphate
  modified_base 6: mod_base = OTHER; note = 2'-O-methyladenosine-3'-phosphate
  modified_base 7: mod_base = OTHER; note = 2'-O-methyluridine-3'-phosphate
  modified_base 8: mod_base = OTHER; note = 2'-O-methyladenosine-3'-phosphate
  modified_base 9: mod_base = OTHER; note = 2'-fluorocytidine-3'-phosphate
  modified_base 10: mod_base = OTHER; note = 2'-fluoroadenosine-3'-phosphate
  modified_base 11: mod_base = OTHER; note = 2'-fluorocytidine-3'-phosphate
  modified_base 12: mod_base = OTHER; note = 2'-O-methylcytidine-3'-phosphate
  modified_base 13: mod_base = OTHER; note = 2'-O-methylcytidine-3'-phosphate
  modified_base 14: mod_base = OTHER; note = 2'-O-methylcytidine-3'-phosphate
  modified_base 15: mod_base = OTHER; note = 2'-O-methyluridine-3'-phosphate
  modified_base 16: mod_base = OTHER; note = 2'-O-methyluridine-3'-phosphate
  modified_base 17: mod_base = OTHER; note = 2'-O-methylcytidine-3'-phosphate
  modified_base 18: mod_base = OTHER; note = 2'-O-methylcytidine-3'-phosphate
  modified_base 19: mod_base = OTHER; note = 2'-O-methyladenosine-3'-phosphate
  modified_base 20: mod_base = OTHER; note = 2'-O-methylcytidine-3'-phosphate
  modified_base 21: mod_base = OTHER; note = 2'-O-methyluridine-3'-phosphate N-[tris(GalNAc-alkyl)-amidodecanoyl)]-4-hydroxyprolinol (Hyp-(GalNAc-alkyl)3)
tgtacatacaccccttccact

SEQ ID NO: 3303 - RNA, 21 nt, synthetic construct
  source 1..21: mol_type = other RNA
  modified_base 1: mod_base = OTHER; note = 2'-O-methylguanosine-3'-phosphorothioate
  modified_base 2: mod_base = OTHER; note = 2'-O-methyluridine-3'-phosphorothioate
  modified_base 3: mod_base = OTHER; note = 2'-O-methyladenosine-3'-phosphate
  modified_base 4: mod_base = OTHER; note = 2'-O-methylcytidine-3'-phosphate
  modified_base 5: mod_base = OTHER; note = 2'-O-methyladenosine-3'-phosphate
  modified_base 6: mod_base = OTHER; note = 2'-O-methyluridine-3'-phosphate
  modified_base 7: mod_base = OTHER; note = 2'-fluoroadenosine-3'-phosphate
  modified_base 8: mod_base = OTHER; note = 2'-O-methylcytidine-3'-phosphate
  modified_base 9: mod_base = OTHER; note = 2'-fluoroadenosine-3'-phosphate
  modified_base 10: mod_base = OTHER; note = 2'-fluorocytidine-3'-phosphate
  modified_base 11: mod_base = OTHER; note = 2'-fluorocytidine-3'-phosphate
  modified_base 12: mod_base = OTHER; note = 2'-O-methylcytidine-3'-phosphate
  modified_base 13: mod_base = OTHER; note = 2'-O-methylcytidine-3'-phosphate
  modified_base 14: mod_base = OTHER; note = 2'-O-methyluridine-3'-phosphate
  modified_base 15: mod_base = OTHER; note = 2'-O-methyluridine-3'-phosphate
  modified_base 16: mod_base = OTHER; note = 2'-O-methylcytidine-3'-phosphate
  modified_base 17: mod_base = OTHER; note = 2'-O-methylcytidine-3'-phosphate
  modified_base 18: mod_base = OTHER; note = 2'-O-methyladenosine-3'-phosphate
  modified_base 19: mod_base = OTHER; note = 2'-O-methylcytidine-3'-phosphate
  modified_base 20: mod_base = OTHER; note = 2'-O-methylcytidine-3'-phosphate
  modified_base 21: mod_base = OTHER; note = 2'-O-methyluridine-3'-phosphate N-[tris(GalNAc-alkyl)-amidodecanoyl)]-4-hydroxyprolinol (Hyp-(GalNAc-alkyl)3)
gtacatacaccccttccacct

SEQ ID NO: 3304 - RNA, 21 nt, synthetic construct
  source 1..21: mol_type = other RNA
  modified_base 1: mod_base = OTHER; note = 2'-O-methylguanosine-3'-phosphorothioate
  modified_base 2: mod_base = OTHER; note = 2'-O-methyluridine-3'-phosphorothioate
  modified_base 3: mod_base = OTHER; note = 2'-O-methyladenosine-3'-phosphate
  modified_base 4: mod_base = OTHER; note = 2'-O-methylcytidine-3'-phosphate
  modified_base 5: mod_base = OTHER; note = 2'-O-methyladenosine-3'-phosphate
  modified_base 6: mod_base = OTHER; note = 2'-O-methyluridine-3'-phosphate
  modified_base 7: mod_base = OTHER; note = 2'-O-methyladenosine-3'-phosphate
  modified_base 8: mod_base = OTHER; note = 2'-O-methylcytidine-3'-phosphate
  modified_base 9: mod_base = OTHER; note = 2'-fluoroadenosine-3'-phosphate
  modified_base 10: mod_base = OTHER; note = 2'-fluorocytidine-3'-phosphate
  modified_base 11: mod_base = OTHER; note = 2'-fluorocytidine-3'-phosphate
  modified_base 12: mod_base = OTHER; note = 2'-O-methylcytidine-3'-phosphate
  modified_base 13: mod_base = OTHER; note = 2'-O-methylcytidine-3'-phosphate
  modified_base 14: mod_base = OTHER; note = 2'-O-methyluridine-3'-phosphate
  modified_base 15: mod_base = OTHER; note = 2'-O-methyluridine-3'-phosphate
  modified_base 16: mod_base = OTHER; note = 2'-O-methylcytidine-3'-phosphate
  modified_base 17: mod_base = OTHER; note = 2'-O-methylcytidine-3'-phosphate
  modified_base 18: mod_base = OTHER; note = 2'-O-methyladenosine-3'-phosphate
  modified_base 19: mod_base = OTHER; note = 2'-O-methylcytidine-3'-phosphate
  modified_base 20: mod_base = OTHER; note = 2'-O-methylcytidine-3'-phosphate
  modified_base 21: mod_base = OTHER; note = 2'-O-methyluridine-3'-phosphate N-[tris(GalNAc-alkyl)-amidodecanoyl)]-4-hydroxyprolinol (Hyp-(GalNAc-alkyl)3)
gtacatacaccccttccacct

SEQ ID NO: 3305 - RNA, 21 nt, synthetic construct
  source 1..21: mol_type = other RNA
  modified_base 1: mod_base = OTHER; note = 2'-O-methyluridine-3'-phosphorothioate
  modified_base 2: mod_base = OTHER; note = 2'-O-methyladenosine-3'-phosphorothioate
  modified_base 3: mod_base = OTHER; note = 2'-O-methylcytidine-3'-phosphate
  modified_base 4: mod_base = OTHER; note = 2'-O-methyladenosine-3'-phosphate
  modified_base 5: mod_base = OTHER; note = 2'-O-methyluridine-3'-phosphate
  modified_base 6: mod_base = OTHER; note = 2'-O-methyladenosine-3'-phosphate
  modified_base 7: mod_base = OTHER; note = 2'-fluorocytidine-3'-phosphate
  modified_base 8: mod_base = OTHER; note = 2'-O-methyladenosine-3'-phosphate
  modified_base 9: mod_base = OTHER; note = 2'-fluorocytidine-3'-phosphate
  modified_base 10: mod_base = OTHER; note = 2'-fluorocytidine-3'-phosphate
  modified_base 11: mod_base = OTHER; note = 2'-fluorocytidine-3'-phosphate
  modified_base 12: mod_base = OTHER; note = 2'-O-methylcytidine-3'-phosphate
  modified_base 13: mod_base = OTHER; note = 2'-O-methyluridine-3'-phosphate
  modified_base 14: mod_base = OTHER; note = 2'-O-methyluridine-3'-phosphate
  modified_base 15: mod_base = OTHER; note = 2'-O-methylcytidine-3'-phosphate
  modified_base 16: mod_base = OTHER; note = 2'-O-methylcytidine-3'-phosphate
  modified_base 17: mod_base = OTHER; note = 2'-O-methyladenosine-3'-phosphate
  modified_base 18: mod_base = OTHER; note = 2'-O-methylcytidine-3'-phosphate
  modified_base 19: mod_base = OTHER; note = 2'-O-methylcytidine-3'-phosphate
  modified_base 20: mod_base = OTHER; note = 2'-O-methyluridine-3'-phosphate
  modified_base 21: mod_base = OTHER; note = 2'-O-methyluridine-3'-phosphate N-[tris(GalNAc-alkyl)-amidodecanoyl)]-4-hydroxyprolinol (Hyp-(GalNAc-alkyl)3)
tacatacaccccttccacctt

SEQ ID NO: 3306 - RNA, 21 nt, synthetic construct
  source 1..21: mol_type = other RNA
  modified_base 1: mod_base = OTHER; note = 2'-O-methyluridine-3'-phosphorothioate
  modified_base 2: mod_base = OTHER; note = 2'-O-methyladenosine-3'-phosphorothioate
  modified_base 3: mod_base = OTHER; note = 2'-O-methylcytidine-3'-phosphate
  modified_base 4: mod_base = OTHER; note = 2'-O-methyladenosine-3'-phosphate
  modified_base 5: mod_base = OTHER; note = 2'-O-methyluridine-3'-phosphate
  modified_base 6: mod_base = OTHER; note = 2'-O-methyladenosine-3'-phosphate
  modified_base 7: mod_base = OTHER; note = 2'-O-methylcytidine-3'-phosphate
  modified_base 8: mod_base = OTHER; note = 2'-O-methyladenosine-3'-phosphate
  modified_base 9: mod_base = OTHER; note = 2'-fluorocytidine-3'-phosphate
  modified_base 10: mod_base = OTHER; note = 2'-fluorocytidine-3'-phosphate
  modified_base 11: mod_base = OTHER; note = 2'-fluorocytidine-3'-phosphate
  modified_base 12: mod_base = OTHER; note = 2'-O-methylcytidine-3'-phosphate
  modified_base 13: mod_base = OTHER; note = 2'-O-methyluridine-3'-phosphate
  modified_base 14: mod_base = OTHER; note = 2'-O-methyluridine-3'-phosphate
  modified_base 15: mod_base = OTHER; note = 2'-O-methylcytidine-3'-phosphate
  modified_base 16: mod_base = OTHER; note = 2'-O-methylcytidine-3'-phosphate
  modified_base 17: mod_base = OTHER; note = 2'-O-methyladenosine-3'-phosphate
  modified_base 18: mod_base = OTHER; note = 2'-O-methylcytidine-3'-phosphate
  modified_base 19: mod_base = OTHER; note = 2'-O-methylcytidine-3'-phosphate
  modified_base 20: mod_base = OTHER; note = 2'-O-methyluridine-3'-phosphate
  modified_base 21: mod_base = OTHER; note = 2'-O-methyluridine-3'-phosphate N-[tris(GalNAc-alkyl)-amidodecanoyl)]-4-hydroxyprolinol (Hyp-(GalNAc-alkyl)3)
tacatacaccccttccacctt

SEQ ID NO: 3307 - RNA, 21 nt, synthetic construct
  source 1..21: mol_type = other RNA
  modified_base 1: mod_base = OTHER; note = 2'-O-methyladenosine-3'-phosphorothioate
  modified_base 2: mod_base = OTHER; note = 2'-O-methylcytidine-3'-phosphorothioate
  modified_base 3: mod_base = OTHER; note = 2'-O-methyladenosine-3'-phosphate
  modified_base 4: mod_base = OTHER; note = 2'-O-methyluridine-3'-phosphate
  modified_base 5: mod_base = OTHER; note = 2'-O-methyladenosine-3'-phosphate
  modified_base 6: mod_base = OTHER; note = 2'-O-methylcytidine-3'-phosphate
  modified_base 7: mod_base = OTHER; note = 2'-fluoroadenosine-3'-phosphate
  modified_base 8: mod_base = OTHER; note = 2'-O-methylcytidine-3'-phosphate
  modified_base 9: mod_base = OTHER; note = 2'-fluorocytidine-3'-phosphate
  modified_base 10: mod_base = OTHER; note = 2'-fluorocytidine-3'-phosphate
  modified_base 11: mod_base = OTHER; note = 2'-fluorocytidine-3'-phosphate
  modified_base 12: mod_base = OTHER; note = 2'-O-methyluridine-3'-phosphate
  modified_base 13: mod_base = OTHER; note = 2'-O-methyluridine-3'-phosphate
  modified_base 14: mod_base = OTHER; note = 2'-O-methylcytidine-3'-phosphate
  modified_base 15: mod_base = OTHER; note = 2'-O-methylcytidine-3'-phosphate
  modified_base 16: mod_base = OTHER; note = 2'-O-methyladenosine-3'-phosphate
  modified_base 17: mod_base = OTHER; note = 2'-O-methylcytidine-3'-phosphate
  modified_base 18: mod_base = OTHER; note = 2'-O-methylcytidine-3'-phosphate
  modified_base 19: mod_base = OTHER; note = 2'-O-methyluridine-3'-phosphate
  modified_base 20: mod_base = OTHER; note = 2'-O-methylcytidine-3'-phosphate
  modified_base 21: mod_base = OTHER; note = 2'-O-methyluridine-3'-phosphate N-[tris(GalNAc-alkyl)-amidodecanoyl)]-4-hydroxyprolinol (Hyp-(GalNAc-alkyl)3)
acatacaccccttccacctct

SEQ ID NO: 3308 - RNA, 21 nt, synthetic construct
  source 1..21: mol_type = other RNA
  modified_base 1: mod_base = OTHER; note = 2'-O-methyladenosine-3'-phosphorothioate
  modified_base 2: mod_base = OTHER; note = 2'-O-methylcytidine-3'-phosphorothioate
  modified_base 3: mod_base = OTHER; note = 2'-O-methyladenosine-3'-phosphate
  modified_base 4: mod_base = OTHER; note = 2'-O-methyluridine-3'-phosphate
  modified_base 5: mod_base = OTHER; note = 2'-O-methyladenosine-3'-phosphate
  modified_base 6: mod_base = OTHER; note = 2'-O-methylcytidine-3'-phosphate
  modified_base 7: mod_base = OTHER; note = 2'-O-methyladenosine-3'-phosphate
  modified_base 8: mod_base = OTHER; note = 2'-O-methylcytidine-3'-phosphate
  modified_base 9: mod_base = OTHER; note = 2'-fluorocytidine-3'-phosphate
  modified_base 10: mod_base = OTHER; note = 2'-fluorocytidine-3'-phosphate
  modified_base 11: mod_base = OTHER; note = 2'-fluorocytidine-3'-phosphate
  modified_base 12: mod_base = OTHER; note = 2'-O-methyluridine-3'-phosphate
  modified_base 13: mod_base = OTHER; note = 2'-O-methyluridine-3'-phosphate
  modified_base 14: mod_base = OTHER; note = 2'-O-methylcytidine-3'-phosphate
  modified_base 15: mod_base = OTHER; note = 2'-O-methylcytidine-3'-phosphate
  modified_base 16: mod_base = OTHER; note = 2'-O-methyladenosine-3'-phosphate
  modified_base 17: mod_base = OTHER; note = 2'-O-methylcytidine-3'-phosphate
  modified_base 18: mod_base = OTHER; note = 2'-O-methylcytidine-3'-phosphate
  modified_base 19: mod_base = OTHER; note = 2'-O-methyluridine-3'-phosphate
  modified_base 20: mod_base = OTHER; note = 2'-O-methylcytidine-3'-phosphate
  modified_base 21: mod_base = OTHER; note = 2'-O-methyluridine-3'-phosphate N-[tris(GalNAc-alkyl)-amidodecanoyl)]-4-hydroxyprolinol (Hyp-(GalNAc-alkyl)3)
acatacaccccttccacctct

SEQ ID NO: 3309 - RNA, 21 nt, synthetic construct
  source 1..21: mol_type = other RNA
  modified_base 1: mod_base = OTHER; note = 2'-O-methylcytidine-3'-phosphorothioate
  modified_base 2: mod_base = OTHER; note = 2'-O-methyladenosine-3'-phosphorothioate
  modified_base 3: mod_base = OTHER; note = 2'-O-methyluridine-3'-phosphate
  modified_base 4: mod_base = OTHER; note = 2'-O-methyladenosine-3'-phosphate
  modified_base 5: mod_base = OTHER; note = 2'-O-methylcytidine-3'-phosphate
  modified_base 6: mod_base = OTHER; note = 2'-O-methyladenosine-3'-phosphate
  modified_base 7: mod_base = OTHER; note = 2'-fluorocytidine-3'-phosphate
  modified_base 8: mod_base = OTHER; note = 2'-O-methylcytidine-3'-phosphate
  modified_base 9: mod_base = OTHER; note = 2'-fluorocytidine-3'-phosphate
  modified_base 10: mod_base = OTHER; note = 2'-fluorocytidine-3'-phosphate
  modified_base 11: mod_base = OTHER; note = 2'-fluorouridine-3'-phosphate
  modified_base 12: mod_base = OTHER; note = 2'-O-methyluridine-3'-phosphate
  modified_base 13: mod_base = OTHER; note = 2'-O-methylcytidine-3'-phosphate
  modified_base 14: mod_base = OTHER; note = 2'-O-methylcytidine-3'-phosphate
  modified_base 15: mod_base = OTHER; note = 2'-O-methyladenosine-3'-phosphate
  modified_base 16: mod_base = OTHER; note = 2'-O-methylcytidine-3'-phosphate
  modified_base 17: mod_base = OTHER; note = 2'-O-methylcytidine-3'-phosphate
  modified_base 18: mod_base = OTHER; note = 2'-O-methyluridine-3'-phosphate
  modified_base 19: mod_base = OTHER; note = 2'-O-methylcytidine-3'-phosphate
  modified_base 20: mod_base = OTHER; note = 2'-O-methylguanosine-3'-phosphate
  modified_base 21: mod_base = OTHER; note = 2'-O-methyluridine-3'-phosphate N-[tris(GalNAc-alkyl)-amidodecanoyl)]-4-hydroxyprolinol (Hyp-(GalNAc-alkyl)3)
catacaccccttccacctcgt

SEQ ID NO: 3310 - RNA, 21 nt, synthetic construct
  source 1..21: mol_type = other RNA
  modified_base 1: mod_base = OTHER; note = 2'-O-methylcytidine-3'-phosphorothioate
  modified_base 2: mod_base = OTHER; note = 2'-O-methyladenosine-3'-phosphorothioate
  modified_base 3: mod_base = OTHER; note = 2'-O-methyluridine-3'-phosphate
  modified_base 4: mod_base = OTHER; note = 2'-O-methyladenosine-3'-phosphate
  modified_base 5: mod_base = OTHER; note = 2'-O-methylcytidine-3'-phosphate
  modified_base 6: mod_base = OTHER; note = 2'-O-methyladenosine-3'-phosphate
  modified_base 7: mod_base = OTHER; note = 2'-O-methylcytidine-3'-phosphate
  modified_base 8: mod_base = OTHER; note = 2'-O-methylcytidine-3'-phosphate
  modified_base 9: mod_base = OTHER; note = 2'-fluorocytidine-3'-phosphate
  modified_base 10: mod_base = OTHER; note = 2'-fluorocytidine-3'-phosphate
  modified_base 11: mod_base = OTHER; note = 2'-fluorouridine-3'-phosphate
  modified_base 12: mod_base = OTHER; note = 2'-O-methyluridine-3'-phosphate
  modified_base 13: mod_base = OTHER; note = 2'-O-methylcytidine-3'-phosphate
  modified_base 14: mod_base = OTHER; note = 2'-O-methylcytidine-3'-phosphate
  modified_base 15: mod_base = OTHER; note = 2'-O-methyladenosine-3'-phosphate
  modified_base 16: mod_base = OTHER; note = 2'-O-methylcytidine-3'-phosphate
  modified_base 17: mod_base = OTHER; note = 2'-O-methylcytidine-3'-phosphate
  modified_base 18: mod_base = OTHER; note = 2'-O-methyluridine-3'-phosphate
  modified_base 19: mod_base = OTHER; note = 2'-O-methylcytidine-3'-phosphate
  modified_base 20: mod_base = OTHER; note = 2'-O-methylguanosine-3'-phosphate
  modified_base 21: mod_base = OTHER; note = 2'-O-methyluridine-3'-phosphate N-[tris(GalNAc-alkyl)-amidodecanoyl)]-4-hydroxyprolinol (Hyp-(GalNAc-alkyl)3)
catacaccccttccacctcgt

SEQ ID NO: 3311 - RNA, 21 nt, synthetic construct
  source 1..21: mol_type = other RNA
  modified_base 1: mod_base = OTHER; note = 2'-O-methyladenosine-3'-phosphorothioate
  modified_base 2: mod_base = OTHER; note = 2'-O-methyluridine-3'-phosphorothioate
  modified_base 3: mod_base = OTHER; note = 2'-O-methyladenosine-3'-phosphate
  modified_base 4: mod_base = OTHER; note = 2'-O-methylcytidine-3'-phosphate
  modified_base 5: mod_base = OTHER; note = 2'-O-methyladenosine-3'-phosphate
  modified_base 6: mod_base = OTHER; note = 2'-O-methylcytidine-3'-phosphate
  modified_base 7: mod_base = OTHER; note = 2'-fluorocytidine-3'-phosphate
  modified_base 8: mod_base = OTHER; note = 2'-O-methylcytidine-3'-phosphate
  modified_base 9: mod_base = OTHER; note = 2'-fluorocytidine-3'-phosphate
  modified_base 10: mod_base = OTHER; note = 2'-fluorouridine-3'-phosphate
  modified_base 11: mod_base = OTHER; note = 2'-fluorouridine-3'-phosphate
  modified_base 12: mod_base = OTHER; note = 2'-O-methylcytidine-3'-phosphate
  modified_base 13: mod_base = OTHER; note = 2'-O-methylcytidine-3'-phosphate
  modified_base 14: mod_base = OTHER; note = 2'-O-methyladenosine-3'-phosphate
  modified_base 15: mod_base = OTHER; note = 2'-O-methylcytidine-3'-phosphate
  modified_base 16: mod_base = OTHER; note = 2'-O-methylcytidine-3'-phosphate
  modified_base 17: mod_base = OTHER; note = 2'-O-methyluridine-3'-phosphate
  modified_base 18: mod_base = OTHER; note = 2'-O-methylcytidine-3'-phosphate
  modified_base 19: mod_base = OTHER; note = 2'-O-methylguanosine-3'-phosphate
  modified_base 20: mod_base = OTHER; note = 2'-O-methyluridine-3'-phosphate
  modified_base 21: mod_base = OTHER; note = 2'-O-methyluridine-3'-phosphate N-[tris(GalNAc-alkyl)-amidodecanoyl)]-4-hydroxyprolinol (Hyp-(GalNAc-alkyl)3)
atacaccccttccacctcgtt

SEQ ID NO: 3312 - RNA, 21 nt, synthetic construct
  source 1..21: mol_type = other RNA
  modified_base 1: mod_base = OTHER; note = 2'-O-methyladenosine-3'-phosphorothioate
  modified_base 2: mod_base = OTHER; note = 2'-O-methyluridine-3'-phosphorothioate
  modified_base 3: mod_base = OTHER; note = 2'-O-methyladenosine-3'-phosphate
  modified_base 4: mod_base = OTHER; note = 2'-O-methylcytidine-3'-phosphate
  modified_base 5: mod_base = OTHER; note = 2'-O-methyladenosine-3'-phosphate
  modified_base 6: mod_base = OTHER; note = 2'-O-methylcytidine-3'-phosphate
  modified_base 7: mod_base = OTHER; note = 2'-O-methylcytidine-3'-phosphate
  modified_base 8: mod_base = OTHER; note = 2'-O-methylcytidine-3'-phosphate
  modified_base 9: mod_base = OTHER; note = 2'-fluorocytidine-3'-phosphate
  modified_base 10: mod_base = OTHER; note = 2'-fluorouridine-3'-phosphate
  modified_base 11: mod_base = OTHER; note = 2'-fluorouridine-3'-phosphate
  modified_base 12: mod_base = OTHER; note = 2'-O-methylcytidine-3'-phosphate
  modified_base 13: mod_base = OTHER; note = 2'-O-methylcytidine-3'-phosphate
  modified_base 14: mod_base = OTHER; note = 2'-O-methyladenosine-3'-phosphate
  modified_base 15: mod_base = OTHER; note = 2'-O-methylcytidine-3'-phosphate
  modified_base 16: mod_base = OTHER; note = 2'-O-methylcytidine-3'-phosphate
  modified_base 17: mod_base = OTHER; note = 2'-O-methyluridine-3'-phosphate
  modified_base 18: mod_base = OTHER; note = 2'-O-methylcytidine-3'-phosphate
  modified_base 19: mod_base = OTHER; note = 2'-O-methylguanosine-3'-phosphate
  modified_base 20: mod_base = OTHER; note = 2'-O-methyluridine-3'-phosphate
  modified_base 21: mod_base = OTHER; note = 2'-O-methyluridine-3'-phosphate N-[tris(GalNAc-alkyl)-amidodecanoyl)]-4-hydroxyprolinol (Hyp-(GalNAc-alkyl)3)
atacaccccttccacctcgtt

SEQ ID NO: 3313 - RNA, 21 nt, synthetic construct
  source 1..21: mol_type = other RNA
  modified_base 1: mod_base = OTHER; note = 2'-O-methylcytidine-3'-phosphorothioate
  modified_base 2: mod_base = OTHER; note = 2'-O-methylcytidine-3'-phosphorothioate
  modified_base 3: mod_base = OTHER; note = 2'-O-methylcytidine-3'-phosphate
  modified_base 4: mod_base = OTHER; note = 2'-O-methyluridine-3'-phosphate
  modified_base 5: mod_base = OTHER; note = 2'-O-methyluridine-3'-phosphate
  modified_base 6: mod_base = OTHER; note = 2'-O-methylcytidine-3'-phosphate
  modified_base 7: mod_base = OTHER; note = 2'-fluorocytidine-3'-phosphate
  modified_base 8: mod_base = OTHER; note = 2'-O-methyladenosine-3'-phosphate
  modified_base 9: mod_base = OTHER; note = 2'-fluorocytidine-3'-phosphate
  modified_base 10: mod_base = OTHER; note = 2'-fluorocytidine-3'-phosphate
  modified_base 11: mod_base = OTHER; note = 2'-fluorouridine-3'-phosphate
  modified_base 12: mod_base = OTHER; note = 2'-O-methylcytidine-3'-phosphate
  modified_base 13: mod_base = OTHER; note = 2'-O-methylguanosine-3'-phosphate
  modified_base 14: mod_base = OTHER; note = 2'-O-methyluridine-3'-phosphate
  modified_base 15: mod_base = OTHER; note = 2'-O-methylcytidine-3'-phosphate
  modified_base 16: mod_base = OTHER; note = 2'-O-methyladenosine-3'-phosphate
  modified_base 17: mod_base = OTHER; note = 2'-O-methyluridine-3'-phosphate
  modified_base 18: mod_base = OTHER; note = 2'-O-methylcytidine-3'-phosphate
  modified_base 19: mod_base = OTHER; note = 2'-O-methylcytidine-3'-phosphate
  modified_base 20: mod_base = OTHER; note = 2'-O-methyladenosine-3'-phosphate
  modified_base 21: mod_base = OTHER; note = 2'-O-methyluridine-3'-phosphate N-[tris(GalNAc-alkyl)-amidodecanoyl)]-4-hydroxyprolinol (Hyp-(GalNAc-alkyl)3)
cccttccacctcgtcatccat

SEQ ID NO: 3314 - RNA, 21 nt, synthetic construct
  source 1..21: mol_type = other RNA
  modified_base 1: mod_base = OTHER; note = 2'-O-methylcytidine-3'-phosphorothioate
  modified_base 2: mod_base = OTHER; note = 2'-O-methylcytidine-3'-phosphorothioate
  modified_base 3: mod_base = OTHER; note = 2'-O-methylcytidine-3'-phosphate
  modified_base 4: mod_base = OTHER; note = 2'-O-methyluridine-3'-phosphate
  modified_base 5: mod_base = OTHER; note = 2'-O-methyluridine-3'-phosphate
  modified_base 6: mod_base = OTHER; note = 2'-O-methylcytidine-3'-phosphate
  modified_base 7: mod_base = OTHER; note = 2'-O-methylcytidine-3'-phosphate
  modified_base 8: mod_base = OTHER; note = 2'-O-methyladenosine-3'-phosphate
  modified_base 9: mod_base = OTHER; note = 2'-fluorocytidine-3'-phosphate
  modified_base 10: mod_base = OTHER; note = 2'-fluorocytidine-3'-phosphate
  modified_base 11: mod_base = OTHER; note = 2'-fluorouridine-3'-phosphate
  modified_base 12: mod_base = OTHER; note = 2'-O-methylcytidine-3'-phosphate
  modified_base 13: mod_base = OTHER; note = 2'-O-methylguanosine-3'-phosphate
  modified_base 14: mod_base = OTHER; note = 2'-O-methyluridine-3'-phosphate
  modified_base 15: mod_base = OTHER; note = 2'-O-methylcytidine-3'-phosphate
  modified_base 16: mod_base = OTHER; note = 2'-O-methyladenosine-3'-phosphate
  modified_base 17: mod_base = OTHER; note = 2'-O-methyluridine-3'-phosphate
  modified_base 18: mod_base = OTHER; note = 2'-O-methylcytidine-3'-phosphate
  modified_base 19: mod_base = OTHER; note = 2'-O-methylcytidine-3'-phosphate
  modified_base 20: mod_base = OTHER; note = 2'-O-methyladenosine-3'-phosphate
  modified_base 21: mod_base = OTHER; note = 2'-O-methyluridine-3'-phosphate N-[tris(GalNAc-alkyl)-amidodecanoyl)]-4-hydroxyprolinol (Hyp-(GalNAc-alkyl)3)
cccttccacctcgtcatccat

SEQ ID NO: 3315 - RNA, 21 nt, synthetic construct
  source 1..21: mol_type = other RNA
  modified_base 1: mod_base = OTHER; note = 2'-O-methylcytidine-3'-phosphorothioate
  modified_base 2: mod_base = OTHER; note = 2'-O-methylcytidine-3'-phosphorothioate
  modified_base 3: mod_base = OTHER; note = 2'-O-methyluridine-3'-phosphate
  modified_base 4: mod_base = OTHER; note = 2'-O-methyluridine-3'-phosphate
  modified_base 5: mod_base = OTHER; note = 2'-O-methylcytidine-3'-phosphate
  modified_base 6: mod_base = OTHER; note = 2'-O-methylcytidine-3'-phosphate
  modified_base 7: mod_base = OTHER; note = 2'-fluoroadenosine-3'-phosphate
  modified_base 8: mod_base = OTHER; note = 2'-O-methylcytidine-3'-phosphate
  modified_base 9: mod_base = OTHER; note = 2'-fluorocytidine-3'-phosphate
  modified_base 10: mod_base = OTHER; note = 2'-fluorouridine-3'-phosphate
  modified_base 11: mod_base = OTHER; note = 2'-fluorocytidine-3'-phosphate
  modified_base 12: mod_base = OTHER; note = 2'-O-methylguanosine-3'-phosphate
  modified_base 13: mod_base = OTHER; note = 2'-O-methyluridine-3'-phosphate
  modified_base 14: mod_base = OTHER; note = 2'-O-methylcytidine-3'-phosphate
  modified_base 15: mod_base = OTHER; note = 2'-O-methyladenosine-3'-phosphate
  modified_base 16: mod_base = OTHER; note = 2'-O-methyluridine-3'-phosphate
  modified_base 17: mod_base = OTHER; note = 2'-O-methylcytidine-3'-phosphate
  modified_base 18: mod_base = OTHER; note = 2'-O-methylcytidine-3'-phosphate
  modified_base 19: mod_base = OTHER; note = 2'-O-methyladenosine-3'-phosphate
  modified_base 20: mod_base = OTHER; note = 2'-O-methylcytidine-3'-phosphate
  modified_base 21: mod_base = OTHER; note = 2'-O-methyluridine-3'-phosphate N-[tris(GalNAc-alkyl)-amidodecanoyl)]-4-hydroxyprolinol (Hyp-(GalNAc-alkyl)3)
ccttccacctcgtcatccact

SEQ ID NO: 3316 - RNA, 21 nt, synthetic construct
  source 1..21: mol_type = other RNA
  modified_base 1: mod_base = OTHER; note = 2'-O-methylcytidine-3'-phosphorothioate
  modified_base 2: mod_base = OTHER; note = 2'-O-methylcytidine-3'-phosphorothioate
  modified_base 3: mod_base = OTHER; note = 2'-O-methyluridine-3'-phosphate
  modified_base 4: mod_base = OTHER; note = 2'-O-methyluridine-3'-phosphate
  modified_base 5: mod_base = OTHER; note = 2'-O-methylcytidine-3'-phosphate
  modified_base 6: mod_base = OTHER; note = 2'-O-methylcytidine-3'-phosphate
  modified_base 7: mod_base = OTHER; note = 2'-O-methyladenosine-3'-phosphate
  modified_base 8: mod_base = OTHER; note = 2'-O-methylcytidine-3'-phosphate
  modified_base 9: mod_base = OTHER; note = 2'-fluorocytidine-3'-phosphate
  modified_base 10: mod_base = OTHER; note = 2'-fluorouridine-3'-phosphate
  modified_base 11: mod_base = OTHER; note = 2'-fluorocytidine-3'-phosphate
  modified_base 12: mod_base = OTHER; note = 2'-O-methylguanosine-3'-phosphate
  modified_base 13: mod_base = OTHER; note = 2'-O-methyluridine-3'-phosphate
  modified_base 14: mod_base = OTHER; note = 2'-O-methylcytidine-3'-phosphate
  modified_base 15: mod_base = OTHER; note = 2'-O-methyladenosine-3'-phosphate
  modified_base 16: mod_base = OTHER; note = 2'-O-methyluridine-3'-phosphate
  modified_base 17: mod_base = OTHER; note = 2'-O-methylcytidine-3'-phosphate
  modified_base 18: mod_base = OTHER; note = 2'-O-methylcytidine-3'-phosphate
  modified_base 19: mod_base = OTHER; note = 2'-O-methyladenosine-3'-phosphate
  modified_base 20: mod_base = OTHER; note = 2'-O-methylcytidine-3'-phosphate
  modified_base 21: mod_base = OTHER; note = 2'-O-methyluridine-3'-phosphate N-[tris(GalNAc-alkyl)-amidodecanoyl)]-4-hydroxyprolinol (Hyp-(GalNAc-alkyl)3)
ccttccacctcgtcatccact

SEQ ID NO: 3317 - RNA, 21 nt, synthetic construct
  source 1..21: mol_type = other RNA
  modified_base 1: mod_base = OTHER; note = 2'-O-methylcytidine-3'-phosphorothioate
  modified_base 2: mod_base = OTHER; note = 2'-O-methyladenosine-3'-phosphorothioate
  modified_base 3: mod_base = OTHER; note = 2'-O-methyluridine-3'-phosphate
  modified_base 4: mod_base = OTHER; note = 2'-O-methylguanosine-3'-phosphate
  modified_base 5: mod_base = OTHER; note = 2'-O-methylcytidine-3'-phosphate
  modified_base 6: mod_base = OTHER; note = 2'-O-methyladenosine-3'-phosphate
  modified_base 7: mod_base = OTHER; note = 2'-fluorocytidine-3'-phosphate
  modified_base 8: mod_base = OTHER; note = 2'-O-methyladenosine-3'-phosphate
  modified_base 9: mod_base = OTHER; note = 2'-fluoroguanosine-3'-phosphate
  modified_base 10: mod_base = OTHER; note = 2'-fluorouridine-3'-phosphate
  modified_base 11: mod_base = OTHER; note = 2'-fluoroguanosine-3'-phosphate
  modified_base 12: mod_base = OTHER; note = 2'-O-methyladenosine-3'-phosphate
  modified_base 13: mod_base = OTHER; note = 2'-O-methylguanosine-3'-phosphate
  modified_base 14: mod_base = OTHER; note = 2'-O-methylcytidine-3'-phosphate
  modified_base 15: mod_base = OTHER; note = 2'-O-methyluridine-3'-phosphate
  modified_base 16: mod_base = OTHER; note = 2'-O-methyladenosine-3'-phosphate
  modified_base 17: mod_base = OTHER; note = 2'-O-methyluridine-3'-phosphate
  modified_base 18: mod_base = OTHER; note = 2'-O-methylguanosine-3'-phosphate
  modified_base 19: mod_base = OTHER; note = 2'-O-methylguanosine-3'-phosphate
  modified_base 20: mod_base = OTHER; note = 2'-O-methylguanosine-3'-phosphate
  modified_base 21: mod_base = OTHER; note = 2'-O-methyluridine-3'-phosphate N-[tris(GalNAc-alkyl)-amidodecanoyl)]-4-hydroxyprolinol (Hyp-(GalNAc-alkyl)3)
catgcacagtgagctatgggt

SEQ ID NO: 3318 - RNA, 21 nt, synthetic construct
  source 1..21: mol_type = other RNA
  modified_base 1: mod_base = OTHER; note = 2'-O-methylcytidine-3'-phosphorothioate
  modified_base 2: mod_base = OTHER; note = 2'-O-methyladenosine-3'-phosphorothioate
  modified_base 3: mod_base = OTHER; note = 2'-O-methyluridine-3'-phosphate
  modified_base 4: mod_base = OTHER; note = 2'-O-methylguanosine-3'-phosphate
  modified_base 5: mod_base = OTHER; note = 2'-O-methylcytidine-3'-phosphate
  modified_base 6: mod_base = OTHER; note = 2'-O-methyladenosine-3'-phosphate
  modified_base 7: mod_base = OTHER; note = 2'-O-methylcytidine-3'-phosphate
  modified_base 8: mod_base = OTHER; note = 2'-O-methyladenosine-3'-phosphate
  modified_base 9: mod_base = OTHER; note = 2'-fluoroguanosine-3'-phosphate
  modified_base 10: mod_base = OTHER; note = 2'-fluorouridine-3'-phosphate
  modified_base 11: mod_base = OTHER; note = 2'-fluoroguanosine-3'-phosphate
  modified_base 12: mod_base = OTHER; note = 2'-O-methyladenosine-3'-phosphate
  modified_base 13: mod_base = OTHER; note = 2'-O-methylguanosine-3'-phosphate
  modified_base 14: mod_base = OTHER; note = 2'-O-methylcytidine-3'-phosphate
  modified_base 15: mod_base = OTHER; note = 2'-O-methyluridine-3'-phosphate
  modified_base 16: mod_base = OTHER; note = 2'-O-methyladenosine-3'-phosphate
  modified_base 17: mod_base = OTHER; note = 2'-O-methyluridine-3'-phosphate
  modified_base 18: mod_base = OTHER; note = 2'-O-methylguanosine-3'-phosphate
  modified_base 19: mod_base = OTHER; note = 2'-O-methylguanosine-3'-phosphate
  modified_base 20: mod_base = OTHER; note = 2'-O-methylguanosine-3'-phosphate
  modified_base 21: mod_base = OTHER; note = 2'-O-methyluridine-3'-phosphate N-[tris(GalNAc-alkyl)-amidodecanoyl)]-4-hydroxyprolinol (Hyp-(GalNAc-alkyl)3)
catgcacagtgagctatgggt

SEQ ID NO: 3319 - RNA, 21 nt, synthetic construct
  source 1..21: mol_type = other RNA
  modified_base 1: mod_base = OTHER; note = 2'-O-methyladenosine-3'-phosphorothioate
  modified_base 2: mod_base = OTHER; note = 2'-O-methyluridine-3'-phosphorothioate
  modified_base 3: mod_base = OTHER; note = 2'-O-methylguanosine-3'-phosphate
  modified_base 4: mod_base = OTHER; note = 2'-O-methylcytidine-3'-phosphate
  modified_base 5: mod_base = OTHER; note = 2'-O-methyladenosine-3'-phosphate
  modified_base 6: mod_base = OTHER; note = 2'-O-methylcytidine-3'-phosphate
  modified_base 7: mod_base = OTHER; note = 2'-fluoroadenosine-3'-phosphate
  modified_base 8: mod_base = OTHER; note = 2'-O-methylguanosine-3'-phosphate
  modified_base 9: mod_base = OTHER; note = 2'-fluorouridine-3'-phosphate
  modified_base 10: mod_base = OTHER; note = 2'-fluoroguanosine-3'-phosphate
  modified_base 11: mod_base = OTHER; note = 2'-fluoroadenosine-3'-phosphate
  modified_base 12: mod_base = OTHER; note = 2'-O-methylguanosine-3'-phosphate
  modified_base 13: mod_base = OTHER; note = 2'-O-methylcytidine-3'-phosphate
  modified_base 14: mod_base = OTHER; note = 2'-O-methyluridine-3'-phosphate
  modified_base 15: mod_base = OTHER; note = 2'-O-methyladenosine-3'-phosphate
  modified_base 16: mod_base = OTHER; note = 2'-O-methyluridine-3'-phosphate
  modified_base 17: mod_base = OTHER; note = 2'-O-methylguanosine-3'-phosphate
  modified_base 18: mod_base = OTHER; note = 2'-O-methylguanosine-3'-phosphate
  modified_base 19: mod_base = OTHER; note = 2'-O-methylguanosine-3'-phosphate
  modified_base 20: mod_base = OTHER; note = 2'-O-methylguanosine-3'-phosphate
  modified_base 21: mod_base = OTHER; note = 2'-O-methyluridine-3'-phosphate N-[tris(GalNAc-alkyl)-amidodecanoyl)]-4-hydroxyprolinol (Hyp-(GalNAc-alkyl)3)
atgcacagtgagctatggggt

SEQ ID NO: 3320 - RNA, 21 nt, synthetic construct
  source 1..21: mol_type = other RNA
  modified_base 1: mod_base = OTHER; note = 2'-O-methyladenosine-3'-phosphorothioate
  modified_base 2: mod_base = OTHER; note = 2'-O-methyluridine-3'-phosphorothioate
  modified_base 3: mod_base = OTHER; note = 2'-O-methylguanosine-3'-phosphate
  modified_base 4: mod_base = OTHER; note = 2'-O-methylcytidine-3'-phosphate
  modified_base 5: mod_base = OTHER; note = 2'-O-methyladenosine-3'-phosphate
  modified_base 6: mod_base = OTHER; note = 2'-O-methylcytidine-3'-phosphate
  modified_base 7: mod_base = OTHER; note = 2'-O-methyladenosine-3'-phosphate
  modified_base 8: mod_base = OTHER; note = 2'-O-methylguanosine-3'-phosphate
  modified_base 9: mod_base = OTHER; note = 2'-fluorouridine-3'-phosphate
  modified_base 10: mod_base = OTHER; note = 2'-fluoroguanosine-3'-phosphate
  modified_base 11: mod_base = OTHER; note = 2'-fluoroadenosine-3'-phosphate
  modified_base 12: mod_base = OTHER; note = 2'-O-methylguanosine-3'-phosphate
  modified_base 13: mod_base = OTHER; note = 2'-O-methylcytidine-3'-phosphate
  modified_base 14: mod_base = OTHER; note = 2'-O-methyluridine-3'-phosphate
  modified_base 15: mod_base = OTHER; note = 2'-O-methyladenosine-3'-phosphate
  modified_base 16: mod_base = OTHER; note = 2'-O-methyluridine-3'-phosphate
  modified_base 17: mod_base = OTHER; note = 2'-O-methylguanosine-3'-phosphate
  modified_base 18: mod_base = OTHER; note = 2'-O-methylguanosine-3'-phosphate
  modified_base 19: mod_base = OTHER; note = 2'-O-methylguanosine-3'-phosphate
  modified_base 20: mod_base = OTHER; note = 2'-O-methylguanosine-3'-phosphate
  modified_base 21: mod_base = OTHER; note = 2'-O-methyluridine-3'-phosphate N-[tris(GalNAc-alkyl)-amidodecanoyl)]-4-hydroxyprolinol (Hyp-(GalNAc-alkyl)3)
atgcacagtgagctatggggt

SEQ ID NO: 3321 - RNA, 21 nt, synthetic construct
  source 1..21: mol_type = other RNA
  modified_base 1: mod_base = OTHER; note = 2'-O-methylcytidine-3'-phosphorothioate
  modified_base 2: mod_base = OTHER; note = 2'-O-methylcytidine-3'-phosphorothioate
  modified_base 3: mod_base = OTHER; note = 2'-O-methyluridine-3'-phosphate
  modified_base 4: mod_base = OTHER; note = 2'-O-methylcytidine-3'-phosphate
  modified_base 5: mod_base = OTHER; note = 2'-O-methyluridine-3'-phosphate
  modified_base 6: mod_base = OTHER; note = 2'-O-methylcytidine-3'-phosphate
  modified_base 7: mod_base = OTHER; note = 2'-fluorocytidine-3'-phosphate
  modified_base 8: mod_base = OTHER; note = 2'-O-methylcytidine-3'-phosphate
  modified_base 9: mod_base = OTHER; note = 2'-fluorocytidine-3'-phosphate
  modified_base 10: mod_base = OTHER; note = 2'-fluoroadenosine-3'-phosphate
  modified_base 11: mod_base = OTHER; note = 2'-fluoroadenosine-3'-phosphate
  modified_base 12: mod_base = OTHER; note = 2'-O-methylcytidine-3'-phosphate
  modified_base 13: mod_base = OTHER; note = 2'-O-methylguanosine-3'-phosphate
  modified_base 14: mod_base = OTHER; note = 2'-O-methylguanosine-3'-phosphate
  modified_base 15: mod_base = OTHER; note = 2'-O-methylcytidine-3'-phosphate
  modified_base 16: mod_base = OTHER; note = 2'-O-methyluridine-3'-phosphate
  modified_base 17: mod_base = OTHER; note = 2'-O-methylguanosine-3'-phosphate
  modified_base 18: mod_base = OTHER; note = 2'-O-methyluridine-3'-phosphate
  modified_base 19: mod_base = OTHER; note = 2'-O-methylcytidine-3'-phosphate
  modified_base 20: mod_base = OTHER; note = 2'-O-methyluridine-3'-phosphate
  modified_base 21: mod_base = OTHER; note = 2'-O-methyluridine-3'-phosphate N-[tris(GalNAc-alkyl)-amidodecanoyl)]-4-hydroxyprolinol (Hyp-(GalNAc-alkyl)3)
cctctccccaacggctgtctt

SEQ ID NO: 3322 - RNA, 21 nt, synthetic construct
  source 1..21: mol_type = other RNA
  modified_base 1: mod_base = OTHER; note = 2'-O-methylcytidine-3'-phosphorothioate
  modified_base 2: mod_base = OTHER; note = 2'-O-methylcytidine-3'-phosphorothioate
  modified_base 3: mod_base = OTHER; note = 2'-O-methyluridine-3'-phosphate
  modified_base 4: mod_base = OTHER; note = 2'-O-methylcytidine-3'-phosphate
  modified_base 5: mod_base = OTHER; note = 2'-O-methyluridine-3'-phosphate
  modified_base 6: mod_base = OTHER; note = 2'-O-methylcytidine-3'-phosphate
  modified_base 7: mod_base = OTHER; note = 2'-O-methylcytidine-3'-phosphate
  modified_base 8: mod_base = OTHER; note = 2'-O-methylcytidine-3'-phosphate
  modified_base 9: mod_base = OTHER; note = 2'-fluorocytidine-3'-phosphate
  modified_base 10: mod_base = OTHER; note = 2'-fluoroadenosine-3'-phosphate
  modified_base 11: mod_base = OTHER; note = 2'-fluoroadenosine-3'-phosphate
  modified_base 12: mod_base = OTHER; note = 2'-O-methylcytidine-3'-phosphate
  modified_base 13: mod_base = OTHER; note = 2'-O-methylguanosine-3'-phosphate
  modified_base 14: mod_base = OTHER; note = 2'-O-methylguanosine-3'-phosphate
  modified_base 15: mod_base = OTHER; note = 2'-O-methylcytidine-3'-phosphate
  modified_base 16: mod_base = OTHER; note = 2'-O-methyluridine-3'-phosphate
  modified_base 17: mod_base = OTHER; note = 2'-O-methylguanosine-3'-phosphate
  modified_base 18: mod_base = OTHER; note = 2'-O-methyluridine-3'-phosphate
  modified_base 19: mod_base = OTHER; note = 2'-O-methylcytidine-3'-phosphate
  modified_base 20: mod_base = OTHER; note = 2'-O-methyluridine-3'-phosphate
  modified_base 21: mod_base = OTHER; note = 2'-O-methyluridine-3'-phosphate N-[tris(GalNAc-alkyl)-amidodecanoyl)]-4-hydroxyprolinol (Hyp-(GalNAc-alkyl)3)
cctctccccaacggctgtctt

SEQ ID NO: 3323 - RNA, 21 nt, synthetic construct
  source 1..21: mol_type = other RNA
  modified_base 1: mod_base = OTHER; note = 2'-O-methyladenosine-3'-phosphorothioate
  modified_base 2: mod_base = OTHER; note = 2'-O-methylguanosine-3'-phosphorothioate
  modified_base 3: mod_base = OTHER; note = 2'-O-methylguanosine-3'-phosphate
  modified_base 4: mod_base = OTHER; note = 2'-O-methyluridine-3'-phosphate
  modified_base 5: mod_base = OTHER; note = 2'-O-methylguanosine-3'-phosphate
  modified_base 6: mod_base = OTHER; note = 2'-O-methylcytidine-3'-phosphate
  modified_base 7: mod_base = OTHER; note = 2'-fluorouridine-3'-phosphate
  modified_base 8: mod_base = OTHER; note = 2'-O-methylguanosine-3'-phosphate
  modified_base 9: mod_base = OTHER; note = 2'-fluoroadenosine-3'-phosphate
  modified_base 10: mod_base = OTHER; note = 2'-fluoroadenosine-3'-phosphate
  modified_base 11: mod_base = OTHER; note = 2'-fluorocytidine-3'-phosphate
  modified_base 12: mod_base = OTHER; note = 2'-O-methyladenosine-3'-phosphate
  modified_base 13: mod_base = OTHER; note = 2'-O-methylguanosine-3'-phosphate
  modified_base 14: mod_base = OTHER; note = 2'-O-methylcytidine-3'-phosphate
  modified_base 15: mod_base = OTHER; note = 2'-O-methyladenosine-3'-phosphate
  modified_base 16: mod_base = OTHER; note = 2'-O-methyluridine-3'-phosphate
  modified_base 17: mod_base = OTHER; note = 2'-O-methyluridine-3'-phosphate
  modified_base 18: mod_base = OTHER; note = 2'-O-methyluridine-3'-phosphate
  modified_base 19: mod_base = OTHER; note = 2'-O-methyluridine-3'-phosphate
  modified_base 20: mod_base = OTHER; note = 2'-O-methyluridine-3'-phosphate
  modified_base 21: mod_base = OTHER; note = 2'-O-methyluridine-3'-phosphate N-[tris(GalNAc-alkyl)-amidodecanoyl)]-4-hydroxyprolinol (Hyp-(GalNAc-alkyl)3)
aggtgctgaacagcatttttt

SEQ ID NO: 3324 - RNA, 21 nt, synthetic construct
  source 1..21: mol_type = other RNA
  modified_base 1: mod_base = OTHER; note = 2'-O-methylguanosine-3'-phosphorothioate
  modified_base 2: mod_base = OTHER; note = 2'-O-methylguanosine-3'-phosphorothioate
  modified_base 3: mod_base = OTHER; note = 2'-O-methyluridine-3'-phosphate
  modified_base 4: mod_base = OTHER; note = 2'-O-methylguanosine-3'-phosphate
  modified_base 5: mod_base = OTHER; note = 2'-O-methylcytidine-3'-phosphate
  modified_base 6: mod_base = OTHER; note = 2'-O-methyluridine-3'-phosphate
  modified_base 7: mod_base = OTHER; note = 2'-fluoroguanosine-3'-phosphate
  modified_base 8: mod_base = OTHER; note = 2'-O-methyladenosine-3'-phosphate
  modified_base 9: mod_base = OTHER; note = 2'-fluoroadenosine-3'-phosphate
  modified_base 10: mod_base = OTHER; note = 2'-fluorocytidine-3'-phosphate
  modified_base 11: mod_base = OTHER; note = 2'-fluoroadenosine-3'-phosphate
  modified_base 12: mod_base = OTHER; note = 2'-O-methylguanosine-3'-phosphate
  modified_base 13: mod_base = OTHER; note = 2'-O-methylcytidine-3'-phosphate
  modified_base 14: mod_base = OTHER; note = 2'-O-methyladenosine-3'-phosphate
  modified_base 15: mod_base = OTHER; note = 2'-O-methyluridine-3'-phosphate
  modified_base 16: mod_base = OTHER; note = 2'-O-methyluridine-3'-phosphate
  modified_base 17: mod_base = OTHER; note = 2'-O-methyluridine-3'-phosphate
  modified_base 18: mod_base = OTHER; note = 2'-O-methyluridine-3'-phosphate
  modified_base 19: mod_base = OTHER; note = 2'-O-methyluridine-3'-phosphate
  modified_base 20: mod_base = OTHER; note = 2'-O-methyluridine-3'-phosphate
  modified_base 21: mod_base = OTHER; note = 2'-O-methyluridine-3'-phosphate N-[tris(GalNAc-alkyl)-amidodecanoyl)]-4-hydroxyprolinol (Hyp-(GalNAc-alkyl)3)
ggtgctgaacagcattttttt

SEQ ID NO: 3325 - RNA, 21 nt, synthetic construct
  source 1..21: mol_type = other RNA
  modified_base 1: mod_base = OTHER; note = 2'-O-methylguanosine-3'-phosphorothioate
  modified_base 2: mod_base = OTHER; note = 2'-O-methyluridine-3'-phosphorothioate
  modified_base 3: mod_base = OTHER; note = 2'-O-methylguanosine-3'-phosphate
  modified_base 4: mod_base = OTHER; note = 2'-O-methylcytidine-3'-phosphate
  modified_base 5: mod_base = OTHER; note = 2'-O-methyluridine-3'-phosphate
  modified_base 6: mod_base = OTHER; note = 2'-O-methylguanosine-3'-phosphate
  modified_base 7: mod_base = OTHER; note = 2'-fluoroadenosine-3'-phosphate
  modified_base 8: mod_base = OTHER; note = 2'-O-methyladenosine-3'-phosphate
  modified_base 9: mod_base = OTHER; note = 2'-fluorocytidine-3'-phosphate
  modified_base 10: mod_base = OTHER; note = 2'-fluoroadenosine-3'-phosphate
  modified_base 11: mod_base = OTHER; note = 2'-fluoroguanosine-3'-phosphate
  modified_base 12: mod_base = OTHER; note = 2'-O-methylcytidine-3'-phosphate
  modified_base 13: mod_base = OTHER; note = 2'-O-methyladenosine-3'-phosphate
  modified_base 14: mod_base = OTHER; note = 2'-O-methyluridine-3'-phosphate
  modified_base 15: mod_base = OTHER; note = 2'-O-methyluridine-3'-phosphate
  modified_base 16: mod_base = OTHER; note = 2'-O-methyluridine-3'-phosphate
  modified_base 17: mod_base = OTHER; note = 2'-O-methyluridine-3'-phosphate
  modified_base 18: mod_base = OTHER; note = 2'-O-methyluridine-3'-phosphate
  modified_base 19: mod_base = OTHER; note = 2'-O-methyluridine-3'-phosphate
  modified_base 20: mod_base = OTHER; note = 2'-O-methyluridine-3'-phosphate
  modified_base 21: mod_base = OTHER; note = 2'-O-methyluridine-3'-phosphate N-[tris(GalNAc-alkyl)-amidodecanoyl)]-4-hydroxyprolinol (Hyp-(GalNAc-alkyl)3)
gtgctgaacagcatttttttt

SEQ ID NO: 3326 - RNA, 21 nt, synthetic construct
  source 1..21: mol_type = other RNA
  modified_base 1: mod_base = OTHER; note = 2'-O-methyluridine-3'-phosphorothioate
  modified_base 2: mod_base = OTHER; note = 2'-O-methylguanosine-3'-phosphorothioate
  modified_base 3: mod_base = OTHER; note = 2'-O-methylcytidine-3'-phosphate
  modified_base 4: mod_base = OTHER; note = 2'-O-methyluridine-3'-phosphate
  modified_base 5: mod_base = OTHER; note = 2'-O-methylguanosine-3'-phosphate
  modified_base 6: mod_base = OTHER; note = 2'-O-methyladenosine-3'-phosphate
  modified_base 7: mod_base = OTHER; note = 2'-fluoroadenosine-3'-phosphate
  modified_base 8: mod_base = OTHER; note = 2'-O-methylcytidine-3'-phosphate
  modified_base 9: mod_base = OTHER; note = 2'-fluoroadenosine-3'-phosphate
  modified_base 10: mod_base = OTHER; note = 2'-fluoroguanosine-3'-phosphate
  modified_base 11: mod_base = OTHER; note = 2'-fluorocytidine-3'-phosphate
  modified_base 12: mod_base = OTHER; note = 2'-O-methyladenosine-3'-phosphate
  modified_base 13: mod_base = OTHER; note = 2'-O-methyluridine-3'-phosphate
  modified_base 14: mod_base = OTHER; note = 2'-O-methyluridine-3'-phosphate
  modified_base 15: mod_base = OTHER; note = 2'-O-methyluridine-3'-phosphate
  modified_base 16: mod_base = OTHER; note = 2'-O-methyluridine-3'-phosphate
  modified_base 17: mod_base = OTHER; note = 2'-O-methyluridine-3'-phosphate
  modified_base 18: mod_base = OTHER; note = 2'-O-methyluridine-3'-phosphate
  modified_base 19: mod_base = OTHER; note = 2'-O-methyluridine-3'-phosphate
  modified_base 20: mod_base = OTHER; note = 2'-O-methyluridine-3'-phosphate
  modified_base 21: mod_base = OTHER; note = 2'-O-methyluridine-3'-phosphate N-[tris(GalNAc-alkyl)-amidodecanoyl)]-4-hydroxyprolinol (Hyp-(GalNAc-alkyl)3)
tgctgaacagcattttttttt

SEQ ID NO: 3327 - RNA, 21 nt, synthetic construct
  source 1..21: mol_type = other RNA
  modified_base 1: mod_base = OTHER; note = 2'-O-methylguanosine-3'-phosphorothioate
  modified_base 2: mod_base = OTHER; note = 2'-O-methylcytidine-3'-phosphorothioate
  modified_base 3: mod_base = OTHER; note = 2'-O-methyluridine-3'-phosphate
  modified_base 4: mod_base = OTHER; note = 2'-O-methylguanosine-3'-phosphate
  modified_base 5: mod_base = OTHER; note = 2'-O-methyladenosine-3'-phosphate
  modified_base 6: mod_base = OTHER; note = 2'-O-methyladenosine-3'-phosphate
  modified_base 7: mod_base = OTHER; note = 2'-fluorocytidine-3'-phosphate
  modified_base 8: mod_base = OTHER; note = 2'-O-methyladenosine-3'-phosphate
  modified_base 9: mod_base = OTHER; note = 2'-fluoroguanosine-3'-phosphate
  modified_base 10: mod_base = OTHER; note = 2'-fluorocytidine-3'-phosphate
  modified_base 11: mod_base = OTHER; note = 2'-fluoroadenosine-3'-phosphate
  modified_base 12: mod_base = OTHER; note = 2'-O-methyluridine-3'-phosphate
  modified_base 13: mod_base = OTHER; note = 2'-O-methyluridine-3'-phosphate
  modified_base 14: mod_base = OTHER; note = 2'-O-methyluridine-3'-phosphate
  modified_base 15: mod_base = OTHER; note = 2'-O-methyluridine-3'-phosphate
  modified_base 16: mod_base = OTHER; note = 2'-O-methyluridine-3'-phosphate
  modified_base 17: mod_base = OTHER; note = 2'-O-methyluridine-3'-phosphate
  modified_base 18: mod_base = OTHER; note = 2'-O-methyluridine-3'-phosphate
  modified_base 19: mod_base = OTHER; note = 2'-O-methyluridine-3'-phosphate
  modified_base 20: mod_base = OTHER; note = 2'-O-methylguanosine-3'-phosphate
  modified_base 21: mod_base = OTHER; note = 2'-O-methyluridine-3'-phosphate N-[tris(GalNAc-alkyl)-amidodecanoyl)]-4-hydroxyprolinol (Hyp-(GalNAc-alkyl)3)
gctgaacagcattttttttgt

SEQ ID NO: 3328 - RNA, 21 nt, synthetic construct
  source 1..21: mol_type = other RNA
  modified_base 1: mod_base = OTHER; note = 2'-O-methylcytidine-3'-phosphorothioate
  modified_base 2: mod_base = OTHER; note = 2'-O-methyluridine-3'-phosphorothioate
  modified_base 3: mod_base = OTHER; note = 2'-O-methylguanosine-3'-phosphate
  modified_base 4: mod_base = OTHER; note = 2'-O-methyladenosine-3'-phosphate
  modified_base 5: mod_base = OTHER; note = 2'-O-methyladenosine-3'-phosphate
  modified_base 6: mod_base = OTHER; note = 2'-O-methylcytidine-3'-phosphate
  modified_base 7: mod_base = OTHER; note = 2'-fluoroadenosine-3'-phosphate
  modified_base 8: mod_base = OTHER; note = 2'-O-methylguanosine-3'-phosphate
  modified_base 9: mod_base = OTHER; note = 2'-fluorocytidine-3'-phosphate
  modified_base 10: mod_base = OTHER; note = 2'-fluoroadenosine-3'-phosphate
  modified_base 11: mod_base = OTHER; note = 2'-fluorouridine-3'-phosphate
  modified_base 12: mod_base = OTHER; note = 2'-O-methyluridine-3'-phosphate
  modified_base 13: mod_base = OTHER; note = 2'-O-methyluridine-3'-phosphate
  modified_base 14: mod_base = OTHER; note = 2'-O-methyluridine-3'-phosphate
  modified_base 15: mod_base = OTHER; note = 2'-O-methyluridine-3'-phosphate
  modified_base 16: mod_base = OTHER; note = 2'-O-methyluridine-3'-phosphate
  modified_base 17: mod_base = OTHER; note = 2'-O-methyluridine-3'-phosphate
  modified_base 18: mod_base = OTHER; note = 2'-O-methyluridine-3'-phosphate
  modified_base 19: mod_base = OTHER; note = 2'-O-methylguanosine-3'-phosphate
  modified_base 20: mod_base = OTHER; note = 2'-O-methyladenosine-3'-phosphate
  modified_base 21: mod_base = OTHER; note = 2'-O-methyluridine-3'-phosphate N-[tris(GalNAc-alkyl)-amidodecanoyl)]-4-hydroxyprolinol (Hyp-(GalNAc-alkyl)3)
ctgaacagcattttttttgat

SEQ ID NO: 3329 - RNA, 21 nt, synthetic construct
  source 1..21: mol_type = other RNA
  modified_base 1: mod_base = OTHER; note = 2'-O-methylcytidine-3'-phosphorothioate
  modified_base 2: mod_base = OTHER; note = 2'-O-methylcytidine-3'-phosphorothioate
  modified_base 3: mod_base = OTHER; note = 2'-O-methylcytidine-3'-phosphate
  modified_base 4: mod_base = OTHER; note = 2'-O-methylcytidine-3'-phosphate
  modified_base 5: mod_base = OTHER; note = 2'-O-methyladenosine-3'-phosphate
  modified_base 6: mod_base = OTHER; note = 2'-O-methylguanosine-3'-phosphate
  modified_base 7: mod_base = OTHER; note = 2'-fluorouridine-3'-phosphate
  modified_base 8: mod_base = OTHER; note = 2'-O-methylcytidine-3'-phosphate
  modified_base 9: mod_base = OTHER; note = 2'-fluorouridine-3'-phosphate
  modified_base 10: mod_base = OTHER; note = 2'-fluorocytidine-3'-phosphate
  modified_base 11: mod_base = OTHER; note = 2'-fluorocytidine-3'-phosphate
  modified_base 12: mod_base = OTHER; note = 2'-O-methylcytidine-3'-phosphate
  modified_base 13: mod_base = OTHER; note = 2'-O-methyladenosine-3'-phosphate
  modified_base 14: mod_base = OTHER; note = 2'-O-methylcytidine-3'-phosphate
  modified_base 15: mod_base = OTHER; note = 2'-O-methylcytidine-3'-phosphate
  modified_base 16: mod_base = OTHER; note = 2'-O-methyluridine-3'-phosphate
  modified_base 17: mod_base = OTHER; note = 2'-O-methyluridine-3'-phosphate
  modified_base 18: mod_base = OTHER; note = 2'-O-methyluridine-3'-phosphate
  modified_base 19: mod_base = OTHER; note = 2'-O-methyluridine-3'-phosphate
  modified_base 20: mod_base = OTHER; note = 2'-O-methylcytidine-3'-phosphate
  modified_base 21: mod_base = OTHER; note = 2'-O-methyluridine-3'-phosphate N-[tris(GalNAc-alkyl)-amidodecanoyl)]-4-hydroxyprolinol (Hyp-(GalNAc-alkyl)3)
ccccagtctcccaccttttct

SEQ ID NO: 3330 - RNA, 21 nt, synthetic construct
  source 1..21: mol_type = other RNA
  modified_base 1: mod_base = OTHER; note = 2'-O-methylcytidine-3'-phosphorothioate
  modified_base 2: mod_base = OTHER; note = 2'-O-methylcytidine-3'-phosphorothioate
  modified_base 3: mod_base = OTHER; note = 2'-O-methylcytidine-3'-phosphate
  modified_base 4: mod_base = OTHER; note = 2'-O-methylcytidine-3'-phosphate
  modified_base 5: mod_base = OTHER; note = 2'-O-methyladenosine-3'-phosphate
  modified_base 6: mod_base = OTHER; note = 2'-O-methylguanosine-3'-phosphate
  modified_base 7: mod_base = OTHER; note = 2'-O-methyluridine-3'-phosphate
  modified_base 8: mod_base = OTHER; note = 2'-O-methylcytidine-3'-phosphate
  modified_base 9: mod_base = OTHER; note = 2'-fluorouridine-3'-phosphate
  modified_base 10: mod_base = OTHER; note = 2'-fluorocytidine-3'-phosphate
  modified_base 11: mod_base = OTHER; note = 2'-fluorocytidine-3'-phosphate
  modified_base 12: mod_base = OTHER; note = 2'-O-methylcytidine-3'-phosphate
  modified_base 13: mod_base = OTHER; note = 2'-O-methyladenosine-3'-phosphate
  modified_base 14: mod_base = OTHER; note = 2'-O-methylcytidine-3'-phosphate
  modified_base 15: mod_base = OTHER; note = 2'-O-methylcytidine-3'-phosphate
  modified_base 16: mod_base = OTHER; note = 2'-O-methyluridine-3'-phosphate
  modified_base 17: mod_base = OTHER; note = 2'-O-methyluridine-3'-phosphate
  modified_base 18: mod_base = OTHER; note = 2'-O-methyluridine-3'-phosphate
  modified_base 19: mod_base = OTHER; note = 2'-O-methyluridine-3'-phosphate
  modified_base 20: mod_base = OTHER; note = 2'-O-methylcytidine-3'-phosphate
  modified_base 21: mod_base = OTHER; note = 2'-O-methyluridine-3'-phosphate N-[tris(GalNAc-alkyl)-amidodecanoyl)]-4-hydroxyprolinol (Hyp-(GalNAc-alkyl)3)
ccccagtctcccaccttttct

SEQ ID NO: 3331 - RNA, 21 nt, synthetic construct
  source 1..21: mol_type = other RNA
  modified_base 1: mod_base = OTHER; note = 2'-O-methylcytidine-3'-phosphorothioate
  modified_base 2: mod_base = OTHER; note = 2'-O-methylcytidine-3'-phosphorothioate
  modified_base 3: mod_base = OTHER; note = 2'-O-methylcytidine-3'-phosphate
  modified_base 4: mod_base = OTHER; note = 2'-O-methyladenosine-3'-phosphate
  modified_base 5: mod_base = OTHER; note = 2'-O-methylguanosine-3'-phosphate
  modified_base 6: mod_base = OTHER; note = 2'-O-methyluridine-3'-phosphate
  modified_base 7: mod_base = OTHER; note = 2'-fluorocytidine-3'-phosphate
  modified_base 8: mod_base = OTHER; note = 2'-O-methyluridine-3'-phosphate
  modified_base 9: mod_base = OTHER; note = 2'-fluorocytidine-3'-phosphate
  modified_base 10: mod_base = OTHER; note = 2'-fluorocytidine-3'-phosphate
  modified_base 11: mod_base = OTHER; note = 2'-fluorocytidine-3'-phosphate
  modified_base 12: mod_base = OTHER; note = 2'-O-methyladenosine-3'-phosphate
  modified_base 13: mod_base = OTHER; note = 2'-O-methylcytidine-3'-phosphate
  modified_base 14: mod_base = OTHER; note = 2'-O-methylcytidine-3'-phosphate
  modified_base 15: mod_base = OTHER; note = 2'-O-methyluridine-3'-phosphate
  modified_base 16: mod_base = OTHER; note = 2'-O-methyluridine-3'-phosphate
  modified_base 17: mod_base = OTHER; note = 2'-O-methyluridine-3'-phosphate
  modified_base 18: mod_base = OTHER; note = 2'-O-methyluridine-3'-phosphate
  modified_base 19: mod_base = OTHER; note = 2'-O-methylcytidine-3'-phosphate
  modified_base 20: mod_base = OTHER; note = 2'-O-methyluridine-3'-phosphate
  modified_base 21: mod_base = OTHER; note = 2'-O-methyluridine-3'-phosphate N-[tris(GalNAc-alkyl)-amidodecanoyl)]-4-hydroxyprolinol (Hyp-(GalNAc-alkyl)3)
cccagtctcccaccttttctt

SEQ ID NO: 3332 - RNA, 21 nt, synthetic construct
  source 1..21: mol_type = other RNA
  modified_base 1: mod_base = OTHER; note = 2'-O-methylcytidine-3'-phosphorothioate
  modified_base 2: mod_base = OTHER; note = 2'-O-methylcytidine-3'-phosphorothioate
  modified_base 3: mod_base = OTHER; note = 2'-O-methylcytidine-3'-phosphate
  modified_base 4: mod_base = OTHER; note = 2'-O-methyladenosine-3'-phosphate
  modified_base 5: mod_base = OTHER; note = 2'-O-methylguanosine-3'-phosphate
  modified_base 6: mod_base = OTHER; note = 2'-O-methyluridine-3'-phosphate
  modified_base 7: mod_base = OTHER; note = 2'-O-methylcytidine-3'-phosphate
  modified_base 8: mod_base = OTHER; note = 2'-O-methyluridine-3'-phosphate
  modified_base 9: mod_base = OTHER; note = 2'-fluorocytidine-3'-phosphate
  modified_base 10: mod_base = OTHER; note = 2'-fluorocytidine-3'-phosphate
  modified_base 11: mod_base = OTHER; note = 2'-fluorocytidine-3'-phosphate
  modified_base 12: mod_base = OTHER; note = 2'-O-methyladenosine-3'-phosphate
  modified_base 13: mod_base = OTHER; note = 2'-O-methylcytidine-3'-phosphate
  modified_base 14: mod_base = OTHER; note = 2'-O-methylcytidine-3'-phosphate
  modified_base 15: mod_base = OTHER; note = 2'-O-methyluridine-3'-phosphate
  modified_base 16: mod_base = OTHER; note = 2'-O-methyluridine-3'-phosphate
  modified_base 17: mod_base = OTHER; note = 2'-O-methyluridine-3'-phosphate
  modified_base 18: mod_base = OTHER; note = 2'-O-methyluridine-3'-phosphate
  modified_base 19: mod_base = OTHER; note = 2'-O-methylcytidine-3'-phosphate
  modified_base 20: mod_base = OTHER; note = 2'-O-methyluridine-3'-phosphate
  modified_base 21: mod_base = OTHER; note = 2'-O-methyluridine-3'-phosphate N-[tris(GalNAc-alkyl)-amidodecanoyl)]-4-hydroxyprolinol (Hyp-(GalNAc-alkyl)3)
cccagtctcccaccttttctt

SEQ ID NO: 3333 - RNA, 21 nt, synthetic construct
  source 1..21: mol_type = other RNA
  modified_base 1: mod_base = OTHER; note = 2'-O-methylcytidine-3'-phosphorothioate
  modified_base 2: mod_base = OTHER; note = 2'-O-methylcytidine-3'-phosphorothioate
  modified_base 3: mod_base = OTHER; note = 2'-O-methyladenosine-3'-phosphate
  modified_base 4: mod_base = OTHER; note = 2'-O-methylguanosine-3'-phosphate
  modified_base 5: mod_base = OTHER; note = 2'-O-methyluridine-3'-phosphate
  modified_base 6: mod_base = OTHER; note = 2'-O-methylcytidine-3'-phosphate
  modified_base 7: mod_base = OTHER; note = 2'-fluorouridine-3'-phosphate
  modified_base 8: mod_base = OTHER; note = 2'-O-methylcytidine-3'-phosphate
  modified_base 9: mod_base = OTHER; note = 2'-fluorocytidine-3'-phosphate
  modified_base 10: mod_base = OTHER; note = 2'-fluorocytidine-3'-phosphate
  modified_base 11: mod_base = OTHER; note = 2'-fluoroadenosine-3'-phosphate
  modified_base 12: mod_base = OTHER; note = 2'-O-methylcytidine-3'-phosphate
  modified_base 13: mod_base = OTHER; note = 2'-O-methylcytidine-3'-phosphate
  modified_base 14: mod_base = OTHER; note = 2'-O-methyluridine-3'-phosphate
  modified_base 15: mod_base = OTHER; note = 2'-O-methyluridine-3'-phosphate
  modified_base 16: mod_base = OTHER; note = 2'-O-methyluridine-3'-phosphate
  modified_base 17: mod_base = OTHER; note = 2'-O-methyluridine-3'-phosphate
  modified_base 18: mod_base = OTHER; note = 2'-O-methylcytidine-3'-phosphate
  modified_base 19: mod_base = OTHER; note = 2'-O-methyluridine-3'-phosphate
  modified_base 20: mod_base = OTHER; note = 2'-O-methyluridine-3'-phosphate
  modified_base 21: mod_base = OTHER; note = 2'-O-methyluridine-3'-phosphate N-[tris(GalNAc-alkyl)-amidodecanoyl)]-4-hydroxyprolinol (Hyp-(GalNAc-alkyl)3)
ccagtctcccaccttttcttt

SEQ ID NO: 3334 - RNA, 21 nt, synthetic construct
  source 1..21: mol_type = other RNA
  modified_base 1: mod_base = OTHER; note = 2'-O-methylcytidine-3'-phosphorothioate
  modified_base 2: mod_base = OTHER; note = 2'-O-methylcytidine-3'-phosphorothioate
  modified_base 3: mod_base = OTHER; note = 2'-O-methyladenosine-3'-phosphate
  modified_base 4: mod_base = OTHER; note = 2'-O-methylguanosine-3'-phosphate
  modified_base 5: mod_base = OTHER; note = 2'-O-methyluridine-3'-phosphate
  modified_base 6: mod_base = OTHER; note = 2'-O-methylcytidine-3'-phosphate
  modified_base 7: mod_base = OTHER; note = 2'-O-methyluridine-3'-phosphate
  modified_base 8: mod_base = OTHER; note = 2'-O-methylcytidine-3'-phosphate
  modified_base 9: mod_base = OTHER; note = 2'-fluorocytidine-3'-phosphate
  modified_base 10: mod_base = OTHER; note = 2'-fluorocytidine-3'-phosphate
  modified_base 11: mod_base = OTHER; note = 2'-fluoroadenosine-3'-phosphate
  modified_base 12: mod_base = OTHER; note = 2'-O-methylcytidine-3'-phosphate
  modified_base 13: mod_base = OTHER; note = 2'-O-methylcytidine-3'-phosphate
  modified_base 14: mod_base = OTHER; note = 2'-O-methyluridine-3'-phosphate
  modified_base 15: mod_base = OTHER; note = 2'-O-methyluridine-3'-phosphate
  modified_base 16: mod_base = OTHER; note = 2'-O-methyluridine-3'-phosphate
  modified_base 17: mod_base = OTHER; note = 2'-O-methyluridine-3'-phosphate
  modified_base 18: mod_base = OTHER; note = 2'-O-methylcytidine-3'-phosphate
  modified_base 19: mod_base = OTHER; note = 2'-O-methyluridine-3'-phosphate
  modified_base 20: mod_base = OTHER; note = 2'-O-methyluridine-3'-phosphate
  modified_base 21: mod_base = OTHER; note = 2'-O-methyluridine-3'-phosphate N-[tris(GalNAc-alkyl)-amidodecanoyl)]-4-hydroxyprolinol (Hyp-(GalNAc-alkyl)3)
ccagtctcccaccttttcttt

SEQ ID NO: 3335 - RNA, 21 nt, synthetic construct
  source 1..21: mol_type = other RNA
  modified_base 1: mod_base = OTHER; note = 2'-O-methyladenosine-3'-phosphorothioate
  modified_base 2: mod_base = OTHER; note = 2'-O-methylguanosine-3'-phosphorothioate
  modified_base 3: mod_base = OTHER; note = 2'-O-methyluridine-3'-phosphate
  modified_base 4: mod_base = OTHER; note = 2'-O-methylcytidine-3'-phosphate
  modified_base 5: mod_base = OTHER; note = 2'-O-methyluridine-3'-phosphate
  modified_base 6: mod_base = OTHER; note = 2'-O-methylcytidine-3'-phosphate
  modified_base 7: mod_base = OTHER; note = 2'-fluorocytidine-3'-phosphate
  modified_base 8: mod_base = OTHER; note = 2'-O-methylcytidine-3'-phosphate
  modified_base 9: mod_base = OTHER; note = 2'-fluoroadenosine-3'-phosphate
  modified_base 10: mod_base = OTHER; note = 2'-fluorocytidine-3'-phosphate
  modified_base 11: mod_base = OTHER; note = 2'-fluorocytidine-3'-phosphate
  modified_base 12: mod_base = OTHER; note = 2'-O-methyluridine-3'-phosphate
  modified_base 13: mod_base = OTHER; note = 2'-O-methyluridine-3'-phosphate
  modified_base 14: mod_base = OTHER; note = 2'-O-methyluridine-3'-phosphate
  modified_base 15: mod_base = OTHER; note = 2'-O-methyluridine-3'-phosphate
  modified_base 16: mod_base = OTHER; note = 2'-O-methylcytidine-3'-phosphate
  modified_base 17: mod_base = OTHER; note = 2'-O-methyluridine-3'-phosphate
  modified_base 18: mod_base = OTHER; note = 2'-O-methyluridine-3'-phosphate
  modified_base 19: mod_base = OTHER; note = 2'-O-methylcytidine-3'-phosphate
  modified_base 20: mod_base = OTHER; note = 2'-O-methyluridine-3'-phosphate
  modified_base 21: mod_base = OTHER; note = 2'-O-methyluridine-3'-phosphate N-[tris(GalNAc-alkyl)-amidodecanoyl)]-4-hydroxyprolinol (Hyp-(GalNAc-alkyl)3)
agtctcccaccttttcttctt

SEQ ID NO: 3336 - RNA, 21 nt, synthetic construct
  source 1..21: mol_type = other RNA
  modified_base 1: mod_base = OTHER; note = 2'-O-methyladenosine-3'-phosphorothioate
  modified_base 2: mod_base = OTHER; note = 2'-O-methylguanosine-3'-phosphorothioate
  modified_base 3: mod_base = OTHER; note = 2'-O-methyluridine-3'-phosphate
  modified_base 4: mod_base = OTHER; note = 2'-O-methylcytidine-3'-phosphate
  modified_base 5: mod_base = OTHER; note = 2'-O-methyluridine-3'-phosphate
  modified_base 6: mod_base = OTHER; note = 2'-O-methylcytidine-3'-phosphate
  modified_base 7: mod_base = OTHER; note = 2'-O-methylcytidine-3'-phosphate
  modified_base 8: mod_base = OTHER; note = 2'-O-methylcytidine-3'-phosphate
  modified_base 9: mod_base = OTHER; note = 2'-fluoroadenosine-3'-phosphate
  modified_base 10: mod_base = OTHER; note = 2'-fluorocytidine-3'-phosphate
  modified_base 11: mod_base = OTHER; note = 2'-fluorocytidine-3'-phosphate
  modified_base 12: mod_base = OTHER; note = 2'-O-methyluridine-3'-phosphate
  modified_base 13: mod_base = OTHER; note = 2'-O-methyluridine-3'-phosphate
  modified_base 14: mod_base = OTHER; note = 2'-O-methyluridine-3'-phosphate
  modified_base 15: mod_base = OTHER; note = 2'-O-methyluridine-3'-phosphate
  modified_base 16: mod_base = OTHER; note = 2'-O-methylcytidine-3'-phosphate
  modified_base 17: mod_base = OTHER; note = 2'-O-methyluridine-3'-phosphate
  modified_base 18: mod_base = OTHER; note = 2'-O-methyluridine-3'-phosphate
  modified_base 19: mod_base = OTHER; note = 2'-O-methylcytidine-3'-phosphate
  modified_base 20: mod_base = OTHER; note = 2'-O-methyluridine-3'-phosphate
  modified_base 21: mod_base = OTHER; note = 2'-O-methyluridine-3'-phosphate N-[tris(GalNAc-alkyl)-amidodecanoyl)]-4-hydroxyprolinol (Hyp-(GalNAc-alkyl)3)
agtctcccaccttttcttctt

SEQ ID NO: 3337 - RNA, 21 nt, synthetic construct
  source 1..21: mol_type = other RNA
  modified_base 1: mod_base = OTHER; note = 2'-O-methylguanosine-3'-phosphorothioate
  modified_base 2: mod_base = OTHER; note = 2'-O-methylguanosine-3'-phosphorothioate
  modified_base 3: mod_base = OTHER; note = 2'-O-methyluridine-3'-phosphate
  modified_base 4: mod_base = OTHER; note = 2'-O-methyluridine-3'-phosphate
  modified_base 5: mod_base = OTHER; note = 2'-O-methyluridine-3'-phosphate
  modified_base 6: mod_base = OTHER; note = 2'-O-methyladenosine-3'-phosphate
  modified_base 7: mod_base = OTHER; note = 2'-fluorouridine-3'-phosphate
  modified_base 8: mod_base = OTHER; note = 2'-O-methyluridine-3'-phosphate
  modified_base 9: mod_base = OTHER; note = 2'-fluorouridine-3'-phosphate
  modified_base 10: mod_base = OTHER; note = 2'-fluorouridine-3'-phosphate
  modified_base 11: mod_base = OTHER; note = 2'-fluoroadenosine-3'-phosphate
  modified_base 12: mod_base = OTHER; note = 2'-O-methylguanosine-3'-phosphate
  modified_base 13: mod_base = OTHER; note = 2'-O-methyladenosine-3'-phosphate
  modified_base 14: mod_base = OTHER; note = 2'-O-methylguanosine-3'-phosphate
  modified_base 15: mod_base = OTHER; note = 2'-O-methyladenosine-3'-phosphate
  modified_base 16: mod_base = OTHER; note = 2'-O-methyladenosine-3'-phosphate
  modified_base 17: mod_base = OTHER; note = 2'-O-methyluridine-3'-phosphate
  modified_base 18: mod_base = OTHER; note = 2'-O-methylguanosine-3'-phosphate
  modified_base 19: mod_base = OTHER; note = 2'-O-methylguanosine-3'-phosphate
  modified_base 20: mod_base = OTHER; note = 2'-O-methylguanosine-3'-phosphate
  modified_base 21: mod_base = OTHER; note = 2'-O-methyluridine-3'-phosphate N-[tris(GalNAc-alkyl)-amidodecanoyl)]-4-hydroxyprolinol (Hyp-(GalNAc-alkyl)3)
ggtttattttagagaatgggt

SEQ ID NO: 3338 - RNA, 21 nt, synthetic construct
  source 1..21: mol_type = other RNA
  modified_base 1: mod_base = OTHER; note = 2'-O-methylguanosine-3'-phosphorothioate
  modified_base 2: mod_base = OTHER; note = 2'-O-methylguanosine-3'-phosphorothioate
  modified_base 3: mod_base = OTHER; note = 2'-O-methyluridine-3'-phosphate
  modified_base 4: mod_base = OTHER; note = 2'-O-methyluridine-3'-phosphate
  modified_base 5: mod_base = OTHER; note = 2'-O-methyluridine-3'-phosphate
  modified_base 6: mod_base = OTHER; note = 2'-O-methyladenosine-3'-phosphate
  modified_base 7: mod_base = OTHER; note = 2'-O-methyluridine-3'-phosphate
  modified_base 8: mod_base = OTHER; note = 2'-O-methyluridine-3'-phosphate
  modified_base 9: mod_base = OTHER; note = 2'-fluorouridine-3'-phosphate
  modified_base 10: mod_base = OTHER; note = 2'-fluorouridine-3'-phosphate
  modified_base 11: mod_base = OTHER; note = 2'-fluoroadenosine-3'-phosphate
  modified_base 12: mod_base = OTHER; note = 2'-O-methylguanosine-3'-phosphate
  modified_base 13: mod_base = OTHER; note = 2'-O-methyladenosine-3'-phosphate
  modified_base 14: mod_base = OTHER; note = 2'-O-methylguanosine-3'-phosphate
  modified_base 15: mod_base = OTHER; note = 2'-O-methyladenosine-3'-phosphate
  modified_base 16: mod_base = OTHER; note = 2'-O-methyladenosine-3'-phosphate
  modified_base 17: mod_base = OTHER; note = 2'-O-methyluridine-3'-phosphate
  modified_base 18: mod_base = OTHER; note = 2'-O-methylguanosine-3'-phosphate
  modified_base 19: mod_base = OTHER; note = 2'-O-methylguanosine-3'-phosphate
  modified_base 20: mod_base = OTHER; note = 2'-O-methylguanosine-3'-phosphate
  modified_base 21: mod_base = OTHER; note = 2'-O-methyluridine-3'-phosphate N-[tris(GalNAc-alkyl)-amidodecanoyl)]-4-hydroxyprolinol (Hyp-(GalNAc-alkyl)3)
ggtttattttagagaatgggt

SEQ ID NO: 3339 - RNA, 21 nt, synthetic construct
  source 1..21: mol_type = other RNA
  modified_base 1: mod_base = OTHER; note = 2'-O-methylguanosine-3'-phosphorothioate
  modified_base 2: mod_base = OTHER; note = 2'-O-methyluridine-3'-phosphorothioate
  modified_base 3: mod_base = OTHER; note = 2'-O-methyluridine-3'-phosphate
  modified_base 4: mod_base = OTHER; note = 2'-O-methyluridine-3'-phosphate
  modified_base 5: mod_base = OTHER; note = 2'-O-methyladenosine-3'-phosphate
  modified_base 6: mod_base = OTHER; note = 2'-O-methyluridine-3'-phosphate
  modified_base 7: mod_base = OTHER; note = 2'-fluorouridine-3'-phosphate
  modified_base 8: mod_base = OTHER; note = 2'-O-methyluridine-3'-phosphate
  modified_base 9: mod_base = OTHER; note = 2'-fluorouridine-3'-phosphate
  modified_base 10: mod_base = OTHER; note = 2'-fluoroadenosine-3'-phosphate
  modified_base 11: mod_base = OTHER; note = 2'-fluoroguanosine-3'-phosphate
  modified_base 12: mod_base = OTHER; note = 2'-O-methyladenosine-3'-phosphate
  modified_base 13: mod_base = OTHER; note = 2'-O-methylguanosine-3'-phosphate
  modified_base 14: mod_base = OTHER; note = 2'-O-methyladenosine-3'-phosphate
  modified_base 15: mod_base = OTHER; note = 2'-O-methyladenosine-3'-phosphate
  modified_base 16: mod_base = OTHER; note = 2'-O-methyluridine-3'-phosphate
  modified_base 17: mod_base = OTHER; note = 2'-O-methylguanosine-3'-phosphate
  modified_base 18: mod_base = OTHER; note = 2'-O-methylguanosine-3'-phosphate
  modified_base 19: mod_base = OTHER; note = 2'-O-methylguanosine-3'-phosphate
  modified_base 20: mod_base = OTHER; note = 2'-O-methylguanosine-3'-phosphate
  modified_base 21: mod_base = OTHER; note = 2'-O-methyluridine-3'-phosphate N-[tris(GalNAc-alkyl)-amidodecanoyl)]-4-hydroxyprolinol (Hyp-(GalNAc-alkyl)3)
gtttattttagagaatggggt

SEQ ID NO: 3340 - RNA, 21 nt, synthetic construct
  source 1..21: mol_type = other RNA
  modified_base 1: mod_base = OTHER; note = 2'-O-methylguanosine-3'-phosphorothioate
  modified_base 2: mod_base = OTHER; note = 2'-O-methyluridine-3'-phosphorothioate
  modified_base 3: mod_base = OTHER; note = 2'-O-methyluridine-3'-phosphate
  modified_base 4: mod_base = OTHER; note = 2'-O-methyluridine-3'-phosphate
  modified_base 5: mod_base = OTHER; note = 2'-O-methyladenosine-3'-phosphate
  modified_base 6: mod_base = OTHER; note = 2'-O-methyluridine-3'-phosphate
  modified_base 7: mod_base = OTHER; note = 2'-O-methyluridine-3'-phosphate
  modified_base 8: mod_base = OTHER; note = 2'-O-methyluridine-3'-phosphate
  modified_base 9: mod_base = OTHER; note = 2'-fluorouridine-3'-phosphate
  modified_base 10: mod_base = OTHER; note = 2'-fluoroadenosine-3'-phosphate
  modified_base 11: mod_base = OTHER; note = 2'-fluoroguanosine-3'-phosphate
  modified_base 12: mod_base = OTHER; note = 2'-O-methyladenosine-3'-phosphate
  modified_base 13: mod_base = OTHER; note = 2'-O-methylguanosine-3'-phosphate
  modified_base 14: mod_base = OTHER; note = 2'-O-methyladenosine-3'-phosphate
  modified_base 15: mod_base = OTHER; note = 2'-O-methyladenosine-3'-phosphate
  modified_base 16: mod_base = OTHER; note = 2'-O-methyluridine-3'-phosphate
  modified_base 17: mod_base = OTHER; note = 2'-O-methylguanosine-3'-phosphate
  modified_base 18: mod_base = OTHER; note = 2'-O-methylguanosine-3'-phosphate
  modified_base 19: mod_base = OTHER; note = 2'-O-methylguanosine-3'-phosphate
  modified_base 20: mod_base = OTHER; note = 2'-O-methylguanosine-3'-phosphate
  modified_base 21: mod_base = OTHER; note = 2'-O-methyluridine-3'-phosphate N-[tris(GalNAc-alkyl)-amidodecanoyl)]-4-hydroxyprolinol (Hyp-(GalNAc-alkyl)3)
gtttattttagagaatggggt

SEQ ID NO: 3341 - RNA, 21 nt, synthetic construct
  source 1..21: mol_type = other RNA
  modified_base 1: mod_base = OTHER; note = 2'-O-methyluridine-3'-phosphorothioate
  modified_base 2: mod_base = OTHER; note = 2'-O-methyluridine-3'-phosphorothioate
  modified_base 3: mod_base = OTHER; note = 2'-O-methyluridine-3'-phosphate
  modified_base 4: mod_base = OTHER; note = 2'-O-methyladenosine-3'-phosphate
  modified_base 5: mod_base = OTHER; note = 2'-O-methyluridine-3'-phosphate
  modified_base 6: mod_base = OTHER; note = 2'-O-methyluridine-3'-phosphate
  modified_base 7: mod_base = OTHER; note = 2'-fluorouridine-3'-phosphate
  modified_base 8: mod_base = OTHER; note = 2'-O-methyluridine-3'-phosphate
  modified_base 9: mod_base = OTHER; note = 2'-fluoroadenosine-3'-phosphate
  modified_base 10: mod_base = OTHER; note = 2'-fluoroguanosine-3'-phosphate
  modified_base 11: mod_base = OTHER; note = 2'-fluoroadenosine-3'-phosphate
  modified_base 12: mod_base = OTHER; note = 2'-O-methylguanosine-3'-phosphate
  modified_base 13: mod_base = OTHER; note = 2'-O-methyladenosine-3'-phosphate
  modified_base 14: mod_base = OTHER; note = 2'-O-methyladenosine-3'-phosphate
  modified_base 15: mod_base = OTHER; note = 2'-O-methyluridine-3'-phosphate
  modified_base 16: mod_base = OTHER; note = 2'-O-methylguanosine-3'-phosphate
  modified_base 17: mod_base = OTHER; note = 2'-O-methylguanosine-3'-phosphate
  modified_base 18: mod_base = OTHER; note = 2'-O-methylguanosine-3'-phosphate
  modified_base 19: mod_base = OTHER; note = 2'-O-methylguanosine-3'-phosphate
  modified_base 20: mod_base = OTHER; note = 2'-O-methylguanosine-3'-phosphate
  modified_base 21: mod_base = OTHER; note = 2'-O-methyluridine-3'-phosphate N-[tris(GalNAc-alkyl)-amidodecanoyl)]-4-hydroxyprolinol (Hyp-(GalNAc-alkyl)3)
tttattttagagaatgggggt

SEQ ID NO: 3342 - RNA, 21 nt, synthetic construct
  source 1..21: mol_type = other RNA
  modified_base 1: mod_base = OTHER; note = 2'-O-methyluridine-3'-phosphorothioate
  modified_base 2: mod_base = OTHER; note = 2'-O-methyluridine-3'-phosphorothioate
  modified_base 3: mod_base = OTHER; note = 2'-O-methyluridine-3'-phosphate
  modified_base 4: mod_base = OTHER; note = 2'-O-methyladenosine-3'-phosphate
  modified_base 5: mod_base = OTHER; note = 2'-O-methyluridine-3'-phosphate
  modified_base 6: mod_base = OTHER; note = 2'-O-methyluridine-3'-phosphate
  modified_base 7: mod_base = OTHER; note = 2'-O-methyluridine-3'-phosphate
  modified_base 8: mod_base = OTHER; note = 2'-O-methyluridine-3'-phosphate
  modified_base 9: mod_base = OTHER; note = 2'-fluoroadenosine-3'-phosphate
  modified_base 10: mod_base = OTHER; note = 2'-fluoroguanosine-3'-phosphate
  modified_base 11: mod_base = OTHER; note = 2'-fluoroadenosine-3'-phosphate
  modified_base 12: mod_base = OTHER; note = 2'-O-methylguanosine-3'-phosphate
  modified_base 13: mod_base = OTHER; note = 2'-O-methyladenosine-3'-phosphate
  modified_base 14: mod_base = OTHER; note = 2'-O-methyladenosine-3'-phosphate
  modified_base 15: mod_base = OTHER; note = 2'-O-methyluridine-3'-phosphate
  modified_base 16: mod_base = OTHER; note = 2'-O-methylguanosine-3'-phosphate
  modified_base 17: mod_base = OTHER; note = 2'-O-methylguanosine-3'-phosphate
  modified_base 18: mod_base = OTHER; note = 2'-O-methylguanosine-3'-phosphate
  modified_base 19: mod_base = OTHER; note = 2'-O-methylguanosine-3'-phosphate
  modified_base 20: mod_base = OTHER; note = 2'-O-methylguanosine-3'-phosphate
  modified_base 21: mod_base = OTHER; note = 2'-O-methyluridine-3'-phosphate N-[tris(GalNAc-alkyl)-amidodecanoyl)]-4-hydroxyprolinol (Hyp-(GalNAc-alkyl)3)
tttattttagagaatgggggt

SEQ ID NO: 3343 - RNA, 21 nt, synthetic construct
  source 1..21: mol_type = other RNA
  modified_base 1: mod_base = OTHER; note = 2'-O-methyladenosine-3'-phosphorothioate
  modified_base 2: mod_base = OTHER; note = 2'-O-methylguanosine-3'-phosphorothioate
  modified_base 3: mod_base = OTHER; note = 2'-O-methyladenosine-3'-phosphate
  modified_base 4: mod_base = OTHER; note = 2'-O-methyladenosine-3'-phosphate
  modified_base 5: mod_base = OTHER; note = 2'-O-methyluridine-3'-phosphate
  modified_base 6: mod_base = OTHER; note = 2'-O-methylguanosine-3'-phosphate
  modified_base 7: mod_base = OTHER; note = 2'-fluoroguanosine-3'-phosphate
  modified_base 8: mod_base = OTHER; note = 2'-O-methylguanosine-3'-phosphate
  modified_base 9: mod_base = OTHER; note = 2'-fluoroguanosine-3'-phosphate
  modified_base 10: mod_base = OTHER; note = 2'-fluoroguanosine-3'-phosphate
  modified_base 11: mod_base = OTHER; note = 2'-fluorouridine-3'-phosphate
  modified_base 12: mod_base = OTHER; note = 2'-O-methylguanosine-3'-phosphate
  modified_base 13: mod_base = OTHER; note = 2'-O-methylguanosine-3'-phosphate
  modified_base 14: mod_base = OTHER; note = 2'-O-methylguanosine-3'-phosphate
  modified_base 15: mod_base = OTHER; note = 2'-O-methylguanosine-3'-phosphate
  modified_base 16: mod_base = OTHER; note = 2'-O-methyladenosine-3'-phosphate
  modified_base 17: mod_base = OTHER; note = 2'-O-methylguanosine-3'-phosphate
  modified_base 18: mod_base = OTHER; note = 2'-O-methylguanosine-3'-phosphate
  modified_base 19: mod_base = OTHER; note = 2'-O-methylcytidine-3'-phosphate
  modified_base 20: mod_base = OTHER; note = 2'-O-methyladenosine-3'-phosphate
  modified_base 21: mod_base = OTHER; note = 2'-O-methyluridine-3'-phosphate N-[tris(GalNAc-alkyl)-amidodecanoyl)]-4-hydroxyprolinol (Hyp-(GalNAc-alkyl)3)
agaatgggggtggggaggcat

SEQ ID NO: 3344 - RNA, 21 nt, synthetic construct
  source 1..21: mol_type = other RNA
  modified_base 1: mod_base = OTHER; note = 2'-O-methyladenosine-3'-phosphorothioate
  modified_base 2: mod_base = OTHER; note = 2'-O-methylguanosine-3'-phosphorothioate
  modified_base 3: mod_base = OTHER; note = 2'-O-methyladenosine-3'-phosphate
  modified_base 4: mod_base = OTHER; note = 2'-O-methyladenosine-3'-phosphate
  modified_base 5: mod_base = OTHER; note = 2'-O-methyluridine-3'-phosphate
  modified_base 6: mod_base = OTHER; note = 2'-O-methylguanosine-3'-phosphate
  modified_base 7: mod_base = OTHER; note = 2'-O-methylguanosine-3'-phosphate
  modified_base 8: mod_base = OTHER; note = 2'-O-methylguanosine-3'-phosphate
  modified_base 9: mod_base = OTHER; note = 2'-fluoroguanosine-3'-phosphate
  modified_base 10: mod_base = OTHER; note = 2'-fluoroguanosine-3'-phosphate
  modified_base 11: mod_base = OTHER; note = 2'-fluorouridine-3'-phosphate
  modified_base 12: mod_base = OTHER; note = 2'-O-methylguanosine-3'-phosphate
  modified_base 13: mod_base = OTHER; note = 2'-O-methylguanosine-3'-phosphate
  modified_base 14: mod_base = OTHER; note = 2'-O-methylguanosine-3'-phosphate
  modified_base 15: mod_base = OTHER; note = 2'-O-methylguanosine-3'-phosphate
  modified_base 16: mod_base = OTHER; note = 2'-O-methyladenosine-3'-phosphate
  modified_base 17: mod_base = OTHER; note = 2'-O-methylguanosine-3'-phosphate
  modified_base 18: mod_base = OTHER; note = 2'-O-methylguanosine-3'-phosphate
  modified_base 19: mod_base = OTHER; note = 2'-O-methylcytidine-3'-phosphate
  modified_base 20: mod_base = OTHER; note = 2'-O-methyladenosine-3'-phosphate
  modified_base 21: mod_base = OTHER; note = 2'-O-methyluridine-3'-phosphate N-[tris(GalNAc-alkyl)-amidodecanoyl)]-4-hydroxyprolinol (Hyp-(GalNAc-alkyl)3)
agaatgggggtggggaggcat

SEQ ID NO: 3345 - RNA, 21 nt, synthetic construct
  source 1..21: mol_type = other RNA
  modified_base 1: mod_base = OTHER; note = 2'-O-methylguanosine-3'-phosphorothioate
  modified_base 2: mod_base = OTHER; note = 2'-O-methyladenosine-3'-phosphorothioate
  modified_base 3: mod_base = OTHER; note = 2'-O-methyladenosine-3'-phosphate
  modified_base 4: mod_base = OTHER; note = 2'-O-methyluridine-3'-phosphate
  modified_base 5: mod_base = OTHER; note = 2'-O-methylguanosine-3'-phosphate
  modified_base 6: mod_base = OTHER; note = 2'-O-methylguanosine-3'-phosphate
  modified_base 7: mod_base = OTHER; note = 2'-fluoroguanosine-3'-phosphate
  modified_base 8: mod_base = OTHER; note = 2'-O-methylguanosine-3'-phosphate
  modified_base 9: mod_base = OTHER; note = 2'-fluoroguanosine-3'-phosphate
  modified_base 10: mod_base = OTHER; note = 2'-fluorouridine-3'-phosphate
  modified_base 11: mod_base = OTHER; note = 2'-fluoroguanosine-3'-phosphate
  modified_base 12: mod_base = OTHER; note = 2'-O-methylguanosine-3'-phosphate
  modified_base 13: mod_base = OTHER; note = 2'-O-methylguanosine-3'-phosphate
  modified_base 14: mod_base = OTHER; note = 2'-O-methylguanosine-3'-phosphate
  modified_base 15: mod_base = OTHER; note = 2'-O-methyladenosine-3'-phosphate
  modified_base 16: mod_base = OTHER; note = 2'-O-methylguanosine-3'-phosphate
  modified_base 17: mod_base = OTHER; note = 2'-O-methylguanosine-3'-phosphate
  modified_base 18: mod_base = OTHER; note = 2'-O-methylcytidine-3'-phosphate
  modified_base 19: mod_base = OTHER; note = 2'-O-methyladenosine-3'-phosphate
  modified_base 20: mod_base = OTHER; note = 2'-O-methyladenosine-3'-phosphate
  modified_base 21: mod_base = OTHER; note = 2'-O-methyluridine-3'-phosphate N-[tris(GalNAc-alkyl)-amidodecanoyl)]-4-hydroxyprolinol (Hyp-(GalNAc-alkyl)3)
gaatgggggtggggaggcaat

SEQ ID NO: 3346 - RNA, 21 nt, synthetic construct
  source 1..21: mol_type = other RNA
  modified_base 1: mod_base = OTHER; note = 2'-O-methylguanosine-3'-phosphorothioate
  modified_base 2: mod_base = OTHER; note = 2'-O-methyladenosine-3'-phosphorothioate
  modified_base 3: mod_base = OTHER; note = 2'-O-methyladenosine-3'-phosphate
  modified_base 4: mod_base = OTHER; note = 2'-O-methyluridine-3'-phosphate
  modified_base 5: mod_base = OTHER; note = 2'-O-methylguanosine-3'-phosphate
  modified_base 6: mod_base = OTHER; note = 2'-O-methylguanosine-3'-phosphate
  modified_base 7: mod_base = OTHER; note = 2'-O-methylguanosine-3'-phosphate
  modified_base 8: mod_base = OTHER; note = 2'-O-methylguanosine-3'-phosphate
  modified_base 9: mod_base = OTHER; note = 2'-fluoroguanosine-3'-phosphate
  modified_base 10: mod_base = OTHER; note = 2'-fluorouridine-3'-phosphate
  modified_base 11: mod_base = OTHER; note = 2'-fluoroguanosine-3'-phosphate
  modified_base 12: mod_base = OTHER; note = 2'-O-methylguanosine-3'-phosphate
  modified_base 13: mod_base = OTHER; note = 2'-O-methylguanosine-3'-phosphate
  modified_base 14: mod_base = OTHER; note = 2'-O-methylguanosine-3'-phosphate
  modified_base 15: mod_base = OTHER; note = 2'-O-methyladenosine-3'-phosphate
  modified_base 16: mod_base = OTHER; note = 2'-O-methylguanosine-3'-phosphate
  modified_base 17: mod_base = OTHER; note = 2'-O-methylguanosine-3'-phosphate
  modified_base 18: mod_base = OTHER; note = 2'-O-methylcytidine-3'-phosphate
  modified_base 19: mod_base = OTHER; note = 2'-O-methyladenosine-3'-phosphate
  modified_base 20: mod_base = OTHER; note = 2'-O-methyladenosine-3'-phosphate
  modified_base 21: mod_base = OTHER; note = 2'-O-methyluridine-3'-phosphate N-[tris(GalNAc-alkyl)-amidodecanoyl)]-4-hydroxyprolinol (Hyp-(GalNAc-alkyl)3)
gaatgggggtggggaggcaat

SEQ ID NO: 3347 - RNA, 21 nt, synthetic construct
  source 1..21: mol_type = other RNA
  modified_base 1: mod_base = OTHER; note = 2'-O-methyladenosine-3'-phosphorothioate
  modified_base 2: mod_base = OTHER; note = 2'-O-methyladenosine-3'-phosphorothioate
  modified_base 3: mod_base = OTHER; note = 2'-O-methyluridine-3'-phosphate
  modified_base 4: mod_base = OTHER; note = 2'-O-methylguanosine-3'-phosphate
  modified_base 5: mod_base = OTHER; note = 2'-O-methylguanosine-3'-phosphate
  modified_base 6: mod_base = OTHER; note = 2'-O-methylguanosine-3'-phosphate
  modified_base 7: mod_base = OTHER; note = 2'-fluoroguanosine-3'-phosphate
  modified_base 8: mod_base = OTHER; note = 2'-O-methylguanosine-3'-phosphate
  modified_base 9: mod_base = OTHER; note = 2'-fluorouridine-3'-phosphate
  modified_base 10: mod_base = OTHER; note = 2'-fluoroguanosine-3'-phosphate
  modified_base 11: mod_base = OTHER; note = 2'-fluoroguanosine-3'-phosphate
  modified_base 12: mod_base = OTHER; note = 2'-O-methylguanosine-3'-phosphate
  modified_base 13: mod_base = OTHER; note = 2'-O-methylguanosine-3'-phosphate
  modified_base 14: mod_base = OTHER; note = 2'-O-methyladenosine-3'-phosphate
  modified_base 15: mod_base = OTHER; note = 2'-O-methylguanosine-3'-phosphate
  modified_base 16: mod_base = OTHER; note = 2'-O-methylguanosine-3'-phosphate
  modified_base 17: mod_base = OTHER; note = 2'-O-methylcytidine-3'-phosphate
  modified_base 18: mod_base = OTHER; note = 2'-O-methyladenosine-3'-phosphate
  modified_base 19: mod_base = OTHER; note = 2'-O-methyladenosine-3'-phosphate
  modified_base 20: mod_base = OTHER; note = 2'-O-methylguanosine-3'-phosphate
  modified_base 21: mod_base = OTHER; note = 2'-O-methyluridine-3'-phosphate N-[tris(GalNAc-alkyl)-amidodecanoyl)]-4-hydroxyprolinol (Hyp-(GalNAc-alkyl)3)
aatgggggtggggaggcaagt

SEQ ID NO: 3348 - RNA, 21 nt, synthetic construct
  source 1..21: mol_type = other RNA
  modified_base 1: mod_base = OTHER; note = 2'-O-methyladenosine-3'-phosphorothioate
  modified_base 2: mod_base = OTHER; note = 2'-O-methyladenosine-3'-phosphorothioate
  modified_base 3: mod_base = OTHER; note = 2'-O-methyluridine-3'-phosphate
  modified_base 4: mod_base = OTHER; note = 2'-O-methylguanosine-3'-phosphate
  modified_base 5: mod_base = OTHER; note = 2'-O-methylguanosine-3'-phosphate
  modified_base 6: mod_base = OTHER; note = 2'-O-methylguanosine-3'-phosphate
  modified_base 7: mod_base = OTHER; note = 2'-O-methylguanosine-3'-phosphate
  modified_base 8: mod_base = OTHER; note = 2'-O-methylguanosine-3'-phosphate
  modified_base 9: mod_base = OTHER; note = 2'-fluorouridine-3'-phosphate
  modified_base 10: mod_base = OTHER; note = 2'-fluoroguanosine-3'-phosphate
  modified_base 11: mod_base = OTHER; note = 2'-fluoroguanosine-3'-phosphate
  modified_base 12: mod_base = OTHER; note = 2'-O-methylguanosine-3'-phosphate
  modified_base 13: mod_base = OTHER; note = 2'-O-methylguanosine-3'-phosphate
  modified_base 14: mod_base = OTHER; note = 2'-O-methyladenosine-3'-phosphate
  modified_base 15: mod_base = OTHER; note = 2'-O-methylguanosine-3'-phosphate
  modified_base 16: mod_base = OTHER; note = 2'-O-methylguanosine-3'-phosphate
  modified_base 17: mod_base = OTHER; note = 2'-O-methylcytidine-3'-phosphate
  modified_base 18: mod_base = OTHER; note = 2'-O-methyladenosine-3'-phosphate
  modified_base 19: mod_base = OTHER; note = 2'-O-methyladenosine-3'-phosphate
  modified_base 20: mod_base = OTHER; note = 2'-O-methylguanosine-3'-phosphate
  modified_base 21: mod_base = OTHER; note = 2'-O-methyluridine-3'-phosphate N-[tris(GalNAc-alkyl)-amidodecanoyl)]-4-hydroxyprolinol (Hyp-(GalNAc-alkyl)3)
aatgggggtggggaggcaagt

SEQ ID NO: 3349 - RNA, 21 nt, synthetic construct
  source 1..21: mol_type = other RNA
  modified_base 1: mod_base = OTHER; note = 2'-O-methyladenosine-3'-phosphorothioate
  modified_base 2: mod_base = OTHER; note = 2'-O-methyluridine-3'-phosphorothioate
  modified_base 3: mod_base = OTHER; note = 2'-O-methylguanosine-3'-phosphate
  modified_base 4: mod_base = OTHER; note = 2'-O-methylguanosine-3'-phosphate
  modified_base 5: mod_base = OTHER; note = 2'-O-methylguanosine-3'-phosphate
  modified_base 6: mod_base = OTHER; note = 2'-O-methylguanosine-3'-phosphate
  modified_base 7: mod_base = OTHER; note = 2'-fluoroguanosine-3'-phosphate
  modified_base 8: mod_base = OTHER; note = 2'-O-methyluridine-3'-phosphate
  modified_base 9: mod_base = OTHER; note = 2'-fluoroguanosine-3'-phosphate
  modified_base 10: mod_base = OTHER; note = 2'-fluoroguanosine-3'-phosphate
  modified_base 11: mod_base = OTHER; note = 2'-fluoroguanosine-3'-phosphate
  modified_base 12: mod_base = OTHER; note = 2'-O-methylguanosine-3'-phosphate
  modified_base 13: mod_base = OTHER; note = 2'-O-methyladenosine-3'-phosphate
  modified_base 14: mod_base = OTHER; note = 2'-O-methylguanosine-3'-phosphate
  modified_base 15: mod_base = OTHER; note = 2'-O-methylguanosine-3'-phosphate
  modified_base 16: mod_base = OTHER; note = 2'-O-methylcytidine-3'-phosphate
  modified_base 17: mod_base = OTHER; note = 2'-O-methyladenosine-3'-phosphate
  modified_base 18: mod_base = OTHER; note = 2'-O-methyladenosine-3'-phosphate
  modified_base 19: mod_base = OTHER; note = 2'-O-methylguanosine-3'-phosphate
  modified_base 20: mod_base = OTHER; note = 2'-O-methyladenosine-3'-phosphate
  modified_base 21: mod_base = OTHER; note = 2'-O-methyluridine-3'-phosphate N-[tris(GalNAc-alkyl)-amidodecanoyl)]-4-hydroxyprolinol (Hyp-(GalNAc-alkyl)3)
atgggggtggggaggcaagat

SEQ ID NO: 3350 - RNA, 21 nt, synthetic construct
  source 1..21: mol_type = other RNA
  modified_base 1: mod_base = OTHER; note = 2'-O-methyladenosine-3'-phosphorothioate
  modified_base 2: mod_base = OTHER; note = 2'-O-methyluridine-3'-phosphorothioate
  modified_base 3: mod_base = OTHER; note = 2'-O-methylguanosine-3'-phosphate
  modified_base 4: mod_base = OTHER; note = 2'-O-methylguanosine-3'-phosphate
  modified_base 5: mod_base = OTHER; note = 2'-O-methylguanosine-3'-phosphate
  modified_base 6: mod_base = OTHER; note = 2'-O-methylguanosine-3'-phosphate
  modified_base 7: mod_base = OTHER; note = 2'-O-methylguanosine-3'-phosphate
  modified_base 8: mod_base = OTHER; note = 2'-O-methyluridine-3'-phosphate
  modified_base 9: mod_base = OTHER; note = 2'-fluoroguanosine-3'-phosphate
  modified_base 10: mod_base = OTHER; note = 2'-fluoroguanosine-3'-phosphate
  modified_base 11: mod_base = OTHER; note = 2'-fluoroguanosine-3'-phosphate
  modified_base 12: mod_base = OTHER; note = 2'-O-methylguanosine-3'-phosphate
  modified_base 13: mod_base = OTHER; note = 2'-O-methyladenosine-3'-phosphate
  modified_base 14: mod_base = OTHER; note = 2'-O-methylguanosine-3'-phosphate
  modified_base 15: mod_base = OTHER; note = 2'-O-methylguanosine-3'-phosphate
  modified_base 16: mod_base = OTHER; note = 2'-O-methylcytidine-3'-phosphate
  modified_base 17: mod_base = OTHER; note = 2'-O-methyladenosine-3'-phosphate
  modified_base 18: mod_base = OTHER; note = 2'-O-methyladenosine-3'-phosphate
  modified_base 19: mod_base = OTHER; note = 2'-O-methylguanosine-3'-phosphate
  modified_base 20: mod_base = OTHER; note = 2'-O-methyladenosine-3'-phosphate
  modified_base 21: mod_base = OTHER; note = 2'-O-methyluridine-3'-phosphate N-[tris(GalNAc-alkyl)-amidodecanoyl)]-4-hydroxyprolinol (Hyp-(GalNAc-alkyl)3)
atgggggtggggaggcaagat

SEQ ID NO: 3351 - RNA, 21 nt, synthetic construct
  source 1..21: mol_type = other RNA
  modified_base 1: mod_base = OTHER; note = 2'-O-methyluridine-3'-phosphorothioate
  modified_base 2: mod_base = OTHER; note = 2'-O-methylguanosine-3'-phosphorothioate
  modified_base 3: mod_base = OTHER; note = 2'-O-methylguanosine-3'-phosphate
  modified_base 4: mod_base = OTHER; note = 2'-O-methylguanosine-3'-phosphate
  modified_base 5: mod_base = OTHER; note = 2'-O-methylguanosine-3'-phosphate
  modified_base 6: mod_base = OTHER; note = 2'-O-methylguanosine-3'-phosphate
  modified_base 7: mod_base = OTHER; note = 2'-fluorouridine-3'-phosphate
  modified_base 8: mod_base = OTHER; note = 2'-O-methylguanosine-3'-phosphate
  modified_base 9: mod_base = OTHER; note = 2'-fluoroguanosine-3'-phosphate
  modified_base 10: mod_base = OTHER; note = 2'-fluoroguanosine-3'-phosphate
  modified_base 11: mod_base = OTHER; note = 2'-fluoroguanosine-3'-phosphate
  modified_base 12: mod_base = OTHER; note = 2'-O-methyladenosine-3'-phosphate
  modified_base 13: mod_base = OTHER; note = 2'-O-methylguanosine-3'-phosphate
  modified_base 14: mod_base = OTHER; note = 2'-O-methylguanosine-3'-phosphate
  modified_base 15: mod_base = OTHER; note = 2'-O-methylcytidine-3'-phosphate
  modified_base 16: mod_base = OTHER; note = 2'-O-methyladenosine-3'-phosphate
  modified_base 17: mod_base = OTHER; note = 2'-O-methyladenosine-3'-phosphate
  modified_base 18: mod_base = OTHER; note = 2'-O-methylguanosine-3'-phosphate
  modified_base 19: mod_base = OTHER; note = 2'-O-methyladenosine-3'-phosphate
  modified_base 20: mod_base = OTHER; note = 2'-O-methyladenosine-3'-phosphate
  modified_base 21: mod_base = OTHER; note = 2'-O-methyluridine-3'-phosphate N-[tris(GalNAc-alkyl)-amidodecanoyl)]-4-hydroxyprolinol (Hyp-(GalNAc-alkyl)3)
tgggggtggggaggcaagaat

SEQ ID NO: 3352 - RNA, 21 nt, synthetic construct
  source 1..21: mol_type = other RNA
  modified_base 1: mod_base = OTHER; note = 2'-O-methyluridine-3'-phosphorothioate
  modified_base 2: mod_base = OTHER; note = 2'-O-methylguanosine-3'-phosphorothioate
  modified_base 3: mod_base = OTHER; note = 2'-O-methylguanosine-3'-phosphate
  modified_base 4: mod_base = OTHER; note = 2'-O-methylguanosine-3'-phosphate
  modified_base 5: mod_base = OTHER; note = 2'-O-methylguanosine-3'-phosphate
  modified_base 6: mod_base = OTHER; note = 2'-O-methylguanosine-3'-phosphate
  modified_base 7: mod_base = OTHER; note = 2'-O-methyluridine-3'-phosphate
  modified_base 8: mod_base = OTHER; note = 2'-O-methylguanosine-3'-phosphate
  modified_base 9: mod_base = OTHER; note = 2'-fluoroguanosine-3'-phosphate
  modified_base 10: mod_base = OTHER; note = 2'-fluoroguanosine-3'-phosphate
  modified_base 11: mod_base = OTHER; note = 2'-fluoroguanosine-3'-phosphate
  modified_base 12: mod_base = OTHER; note = 2'-O-methyladenosine-3'-phosphate
  modified_base 13: mod_base = OTHER; note = 2'-O-methylguanosine-3'-phosphate
  modified_base 14: mod_base = OTHER; note = 2'-O-methylguanosine-3'-phosphate
  modified_base 15: mod_base = OTHER; note = 2'-O-methylcytidine-3'-phosphate
  modified_base 16: mod_base = OTHER; note = 2'-O-methyladenosine-3'-phosphate
  modified_base 17: mod_base = OTHER; note = 2'-O-methyladenosine-3'-phosphate
  modified_base 18: mod_base = OTHER; note = 2'-O-methylguanosine-3'-phosphate
  modified_base 19: mod_base = OTHER; note = 2'-O-methyladenosine-3'-phosphate
  modified_base 20: mod_base = OTHER; note = 2'-O-methyladenosine-3'-phosphate
  modified_base 21: mod_base = OTHER; note = 2'-O-methyluridine-3'-phosphate N-[tris(GalNAc-alkyl)-amidodecanoyl)]-4-hydroxyprolinol (Hyp-(GalNAc-alkyl)3)
tgggggtggggaggcaagaat

SEQ ID NO: 3353 - RNA, 21 nt, synthetic construct
  source 1..21: mol_type = other RNA
  modified_base 1: mod_base = OTHER; note = 2'-O-methylguanosine-3'-phosphorothioate
  modified_base 2: mod_base = OTHER; note = 2'-O-methylguanosine-3'-phosphorothioate
  modified_base 3: mod_base = OTHER; note = 2'-O-methylguanosine-3'-phosphate
  modified_base 4: mod_base = OTHER; note = 2'-O-methylguanosine-3'-phosphate
  modified_base 5: mod_base = OTHER; note = 2'-O-methylguanosine-3'-phosphate
  modified_base 6: mod_base = OTHER; note = 2'-O-methyluridine-3'-phosphate
  modified_base 7: mod_base = OTHER; note = 2'-fluoroguanosine-3'-phosphate
  modified_base 8: mod_base = OTHER; note = 2'-O-methylguanosine-3'-phosphate
  modified_base 9: mod_base = OTHER; note = 2'-fluoroguanosine-3'-phosphate
  modified_base 10: mod_base = OTHER; note = 2'-fluoroguanosine-3'-phosphate
  modified_base 11: mod_base = OTHER; note = 2'-fluoroadenosine-3'-phosphate
  modified_base 12: mod_base = OTHER; note = 2'-O-methylguanosine-3'-phosphate
  modified_base 13: mod_base = OTHER; note = 2'-O-methylguanosine-3'-phosphate
  modified_base 14: mod_base = OTHER; note = 2'-O-methylcytidine-3'-phosphate
  modified_base 15: mod_base = OTHER; note = 2'-O-methyladenosine-3'-phosphate
  modified_base 16: mod_base = OTHER; note = 2'-O-methyladenosine-3'-phosphate
  modified_base 17: mod_base = OTHER; note = 2'-O-methylguanosine-3'-phosphate
  modified_base 18: mod_base = OTHER; note = 2'-O-methyladenosine-3'-phosphate
  modified_base 19: mod_base = OTHER; note = 2'-O-methyladenosine-3'-phosphate
  modified_base 20: mod_base = OTHER; note = 2'-O-methylcytidine-3'-phosphate
  modified_base 21: mod_base = OTHER; note = 2'-O-methyluridine-3'-phosphate N-[tris(GalNAc-alkyl)-amidodecanoyl)]-4-hydroxyprolinol (Hyp-(GalNAc-alkyl)3)
gggggtggggaggcaagaact

SEQ ID NO: 3354 - RNA, 21 nt, synthetic construct
  source 1..21: mol_type = other RNA
  modified_base 1: mod_base = OTHER; note = 2'-O-methylguanosine-3'-phosphorothioate
  modified_base 2: mod_base = OTHER; note = 2'-O-methylguanosine-3'-phosphorothioate
  modified_base 3: mod_base = OTHER; note = 2'-O-methylguanosine-3'-phosphate
  modified_base 4: mod_base = OTHER; note = 2'-O-methylguanosine-3'-phosphate
  modified_base 5: mod_base = OTHER; note = 2'-O-methylguanosine-3'-phosphate
  modified_base 6: mod_base = OTHER; note = 2'-O-methyluridine-3'-phosphate
  modified_base 7: mod_base = OTHER; note = 2'-O-methylguanosine-3'-phosphate
  modified_base 8: mod_base = OTHER; note = 2'-O-methylguanosine-3'-phosphate
  modified_base 9: mod_base = OTHER; note = 2'-fluoroguanosine-3'-phosphate
  modified_base 10: mod_base = OTHER; note = 2'-fluoroguanosine-3'-phosphate
  modified_base 11: mod_base = OTHER; note = 2'-fluoroadenosine-3'-phosphate
  modified_base 12: mod_base = OTHER; note = 2'-O-methylguanosine-3'-phosphate
  modified_base 13: mod_base = OTHER; note = 2'-O-methylguanosine-3'-phosphate
  modified_base 14: mod_base = OTHER; note = 2'-O-methylcytidine-3'-phosphate
  modified_base 15: mod_base = OTHER; note = 2'-O-methyladenosine-3'-phosphate
  modified_base 16: mod_base = OTHER; note = 2'-O-methyladenosine-3'-phosphate
  modified_base 17: mod_base = OTHER; note = 2'-O-methylguanosine-3'-phosphate
  modified_base 18: mod_base = OTHER; note = 2'-O-methyladenosine-3'-phosphate
  modified_base 19: mod_base = OTHER; note = 2'-O-methyladenosine-3'-phosphate
  modified_base 20: mod_base = OTHER; note = 2'-O-methylcytidine-3'-phosphate
  modified_base 21: mod_base = OTHER; note = 2'-O-methyluridine-3'-phosphate N-[tris(GalNAc-alkyl)-amidodecanoyl)]-4-hydroxyprolinol (Hyp-(GalNAc-alkyl)3)
gggggtggggaggcaagaact

SEQ ID NO: 3355 - RNA, 21 nt, synthetic construct
  source 1..21: mol_type = other RNA
  modified_base 1: mod_base = OTHER; note = 2'-O-methylguanosine-3'-phosphorothioate
  modified_base 2: mod_base = OTHER; note = 2'-O-methyluridine-3'-phosphorothioate
  modified_base 3: mod_base = OTHER; note = 2'-O-methylguanosine-3'-phosphate
  modified_base 4: mod_base = OTHER; note = 2'-O-methylguanosine-3'-phosphate
  modified_base 5: mod_base = OTHER; note = 2'-O-methylguanosine-3'-phosphate
  modified_base 6: mod_base = OTHER; note = 2'-O-methylguanosine-3'-phosphate
  modified_base 7: mod_base = OTHER; note = 2'-fluoroadenosine-3'-phosphate
  modified_base 8: mod_base = OTHER; note = 2'-O-methylguanosine-3'-phosphate
  modified_base 9: mod_base = OTHER; note = 2'-fluoroguanosine-3'-phosphate
  modified_base 10: mod_base = OTHER; note = 2'-fluorocytidine-3'-phosphate
  modified_base 11: mod_base = OTHER; note = 2'-fluoroadenosine-3'-phosphate
  modified_base 12: mod_base = OTHER; note = 2'-O-methyladenosine-3'-phosphate
  modified_base 13: mod_base = OTHER; note = 2'-O-methylguanosine-3'-phosphate
  modified_base 14: mod_base = OTHER; note = 2'-O-methyladenosine-3'-phosphate
  modified_base 15: mod_base = OTHER; note = 2'-O-methyladenosine-3'-phosphate
  modified_base 16: mod_base = OTHER; note = 2'-O-methylcytidine-3'-phosphate
  modified_base 17: mod_base = OTHER; note = 2'-O-methylcytidine-3'-phosphate
  modified_base 18: mod_base = OTHER; note = 2'-O-methyladenosine-3'-phosphate
  modified_base 19: mod_base = OTHER; note = 2'-O-methylguanosine-3'-phosphate
  modified_base 20: mod_base = OTHER; note = 2'-O-methyluridine-3'-phosphate
  modified_base 21: mod_base = OTHER; note = 2'-O-methyluridine-3'-phosphate N-[tris(GalNAc-alkyl)-amidodecanoyl)]-4-hydroxyprolinol (Hyp-(GalNAc-alkyl)3)
gtggggaggcaagaaccagtt

SEQ ID NO: 3356 - RNA, 21 nt, synthetic construct
  source 1..21: mol_type = other RNA
  modified_base 1: mod_base = OTHER; note = 2'-O-methylguanosine-3'-phosphorothioate
  modified_base 2: mod_base = OTHER; note = 2'-O-methyluridine-3'-phosphorothioate
  modified_base 3: mod_base = OTHER; note = 2'-O-methylguanosine-3'-phosphate
  modified_base 4: mod_base = OTHER; note = 2'-O-methylguanosine-3'-phosphate
  modified_base 5: mod_base = OTHER; note = 2'-O-methylguanosine-3'-phosphate
  modified_base 6: mod_base = OTHER; note = 2'-O-methylguanosine-3'-phosphate
  modified_base 7: mod_base = OTHER; note = 2'-O-methyladenosine-3'-phosphate
  modified_base 8: mod_base = OTHER; note = 2'-O-methylguanosine-3'-phosphate
  modified_base 9: mod_base = OTHER; note = 2'-fluoroguanosine-3'-phosphate
  modified_base 10: mod_base = OTHER; note = 2'-fluorocytidine-3'-phosphate
  modified_base 11: mod_base = OTHER; note = 2'-fluoroadenosine-3'-phosphate
  modified_base 12: mod_base = OTHER; note = 2'-O-methyladenosine-3'-phosphate
  modified_base 13: mod_base = OTHER; note = 2'-O-methylguanosine-3'-phosphate
  modified_base 14: mod_base = OTHER; note = 2'-O-methyladenosine-3'-phosphate
  modified_base 15: mod_base = OTHER; note = 2'-O-methyladenosine-3'-phosphate
  modified_base 16: mod_base = OTHER; note = 2'-O-methylcytidine-3'-phosphate
  modified_base 17: mod_base = OTHER; note = 2'-O-methylcytidine-3'-phosphate
  modified_base 18: mod_base = OTHER; note = 2'-O-methyladenosine-3'-phosphate
  modified_base 19: mod_base = OTHER; note = 2'-O-methylguanosine-3'-phosphate
  modified_base 20: mod_base = OTHER; note = 2'-O-methyluridine-3'-phosphate
  modified_base 21: mod_base = OTHER; note = 2'-O-methyluridine-3'-phosphate N-[tris(GalNAc-alkyl)-amidodecanoyl)]-4-hydroxyprolinol (Hyp-(GalNAc-alkyl)3)
gtggggaggcaagaaccagtt

SEQ ID NO: 3357 - RNA, 21 nt, synthetic construct
  source 1..21: mol_type = other RNA
  modified_base 1: mod_base = OTHER; note = 2'-O-methyluridine-3'-phosphorothioate
  modified_base 2: mod_base = OTHER; note = 2'-O-methylguanosine-3'-phosphorothioate
  modified_base 3: mod_base = OTHER; note = 2'-O-methylguanosine-3'-phosphate
  modified_base 4: mod_base = OTHER; note = 2'-O-methylguanosine-3'-phosphate
  modified_base 5: mod_base = OTHER; note = 2'-O-methylguanosine-3'-phosphate
  modified_base 6: mod_base = OTHER; note = 2'-O-methyladenosine-3'-phosphate
  modified_base 7: mod_base = OTHER; note = 2'-fluoroguanosine-3'-phosphate
  modified_base 8: mod_base = OTHER; note = 2'-O-methylguanosine-3'-phosphate
  modified_base 9: mod_base = OTHER; note = 2'-fluorocytidine-3'-phosphate
  modified_base 10: mod_base = OTHER; note = 2'-fluoroadenosine-3'-phosphate
  modified_base 11: mod_base = OTHER; note = 2'-fluoroadenosine-3'-phosphate
  modified_base 12: mod_base = OTHER; note = 2'-O-methylguanosine-3'-phosphate
  modified_base 13: mod_base = OTHER; note = 2'-O-methyladenosine-3'-phosphate
  modified_base 14: mod_base = OTHER; note = 2'-O-methyladenosine-3'-phosphate
  modified_base 15: mod_base = OTHER; note = 2'-O-methylcytidine-3'-phosphate
  modified_base 16: mod_base = OTHER; note = 2'-O-methylcytidine-3'-phosphate
  modified_base 17: mod_base = OTHER; note = 2'-O-methyladenosine-3'-phosphate
  modified_base 18: mod_base = OTHER; note = 2'-O-methylguanosine-3'-phosphate
  modified_base 19: mod_base = OTHER; note = 2'-O-methyluridine-3'-phosphate
  modified_base 20: mod_base = OTHER; note = 2'-O-methylguanosine-3'-phosphate
  modified_base 21: mod_base = OTHER; note = 2'-O-methyluridine-3'-phosphate N-[tris(GalNAc-alkyl)-amidodecanoyl)]-4-hydroxyprolinol (Hyp-(GalNAc-alkyl)3)
tggggaggcaagaaccagtgt

SEQ ID NO: 3358 - RNA, 21 nt, synthetic construct
  source 1..21: mol_type = other RNA
  modified_base 1: mod_base = OTHER; note = 2'-O-methyluridine-3'-phosphorothioate
  modified_base 2: mod_base = OTHER; note = 2'-O-methylguanosine-3'-phosphorothioate
  modified_base 3: mod_base = OTHER; note = 2'-O-methylguanosine-3'-phosphate
  modified_base 4: mod_base = OTHER; note = 2'-O-methylguanosine-3'-phosphate
  modified_base 5: mod_base = OTHER; note = 2'-O-methylguanosine-3'-phosphate
  modified_base 6: mod_base = OTHER; note = 2'-O-methyladenosine-3'-phosphate
  modified_base 7: mod_base = OTHER; note = 2'-O-methylguanosine-3'-phosphate
  modified_base 8: mod_base = OTHER; note = 2'-O-methylguanosine-3'-phosphate
  modified_base 9: mod_base = OTHER; note = 2'-fluorocytidine-3'-phosphate
  modified_base 10: mod_base = OTHER; note = 2'-fluoroadenosine-3'-phosphate
  modified_base 11: mod_base = OTHER; note = 2'-fluoroadenosine-3'-phosphate
  modified_base 12: mod_base = OTHER; note = 2'-O-methylguanosine-3'-phosphate
  modified_base 13: mod_base = OTHER; note = 2'-O-methyladenosine-3'-phosphate
  modified_base 14: mod_base = OTHER; note = 2'-O-methyladenosine-3'-phosphate
  modified_base 15: mod_base = OTHER; note = 2'-O-methylcytidine-3'-phosphate
  modified_base 16: mod_base = OTHER; note = 2'-O-methylcytidine-3'-phosphate
  modified_base 17: mod_base = OTHER; note = 2'-O-methyladenosine-3'-phosphate
  modified_base 18: mod_base = OTHER; note = 2'-O-methylguanosine-3'-phosphate
  modified_base 19: mod_base = OTHER; note = 2'-O-methyluridine-3'-phosphate
  modified_base 20: mod_base = OTHER; note = 2'-O-methylguanosine-3'-phosphate
  modified_base 21: mod_base = OTHER; note = 2'-O-methyluridine-3'-phosphate N-[tris(GalNAc-alkyl)-amidodecanoyl)]-4-hydroxyprolinol (Hyp-(GalNAc-alkyl)3)
tggggaggcaagaaccagtgt

SEQ ID NO: 3359 - RNA, 21 nt, synthetic construct
  source 1..21: mol_type = other RNA
  modified_base 1: mod_base = OTHER; note = 2'-O-methylguanosine-3'-phosphorothioate
  modified_base 2: mod_base = OTHER; note = 2'-O-methylguanosine-3'-phosphorothioate
  modified_base 3: mod_base = OTHER; note = 2'-O-methylguanosine-3'-phosphate
  modified_base 4: mod_base = OTHER; note = 2'-O-methylguanosine-3'-phosphate
  modified_base 5: mod_base = OTHER; note = 2'-O-methyladenosine-3'-phosphate
  modified_base 6: mod_base = OTHER; note = 2'-O-methylguanosine-3'-phosphate
  modified_base 7: mod_base = OTHER; note = 2'-fluoroguanosine-3'-phosphate
  modified_base 8: mod_base = OTHER; note = 2'-O-methylcytidine-3'-phosphate
  modified_base 9: mod_base = OTHER; note = 2'-fluoroadenosine-3'-phosphate
  modified_base 10: mod_base = OTHER; note = 2'-fluoroadenosine-3'-phosphate
  modified_base 11: mod_base = OTHER; note = 2'-fluoroguanosine-3'-phosphate
  modified_base 12: mod_base = OTHER; note = 2'-O-methyladenosine-3'-phosphate
  modified_base 13: mod_base = OTHER; note = 2'-O-methyladenosine-3'-phosphate
  modified_base 14: mod_base = OTHER; note = 2'-O-methylcytidine-3'-phosphate
  modified_base 15: mod_base = OTHER; note = 2'-O-methylcytidine-3'-phosphate
  modified_base 16: mod_base = OTHER; note = 2'-O-methyladenosine-3'-phosphate
  modified_base 17: mod_base = OTHER; note = 2'-O-methylguanosine-3'-phosphate
  modified_base 18: mod_base = OTHER; note = 2'-O-methyluridine-3'-phosphate
  modified_base 19: mod_base = OTHER; note = 2'-O-methylguanosine-3'-phosphate
  modified_base 20: mod_base = OTHER; note = 2'-O-methyluridine-3'-phosphate
  modified_base 21: mod_base = OTHER; note = 2'-O-methyluridine-3'-phosphate N-[tris(GalNAc-alkyl)-amidodecanoyl)]-4-hydroxyprolinol (Hyp-(GalNAc-alkyl)3)
ggggaggcaagaaccagtgtt

SEQ ID NO: 3360 - RNA, 21 nt, synthetic construct
  source 1..21: mol_type = other RNA
  modified_base 1: mod_base = OTHER; note = 2'-O-methylguanosine-3'-phosphorothioate
  modified_base 2: mod_base = OTHER; note = 2'-O-methylguanosine-3'-phosphorothioate
  modified_base 3: mod_base = OTHER; note = 2'-O-methylguanosine-3'-phosphate
  modified_base 4: mod_base = OTHER; note = 2'-O-methylguanosine-3'-phosphate
  modified_base 5: mod_base = OTHER; note = 2'-O-methyladenosine-3'-phosphate
  modified_base 6: mod_base = OTHER; note = 2'-O-methylguanosine-3'-phosphate
  modified_base 7: mod_base = OTHER; note = 2'-O-methylguanosine-3'-phosphate
  modified_base 8: mod_base = OTHER; note = 2'-O-methylcytidine-3'-phosphate
  modified_base 9: mod_base = OTHER; note = 2'-fluoroadenosine-3'-phosphate
  modified_base 10: mod_base = OTHER; note = 2'-fluoroadenosine-3'-phosphate
  modified_base 11: mod_base = OTHER; note = 2'-fluoroguanosine-3'-phosphate
  modified_base 12: mod_base = OTHER; note = 2'-O-methyladenosine-3'-phosphate
  modified_base 13: mod_base = OTHER; note = 2'-O-methyladenosine-3'-phosphate
  modified_base 14: mod_base = OTHER; note = 2'-O-methylcytidine-3'-phosphate
  modified_base 15: mod_base = OTHER; note = 2'-O-methylcytidine-3'-phosphate
  modified_base 16: mod_base = OTHER; note = 2'-O-methyladenosine-3'-phosphate
  modified_base 17: mod_base = OTHER; note = 2'-O-methylguanosine-3'-phosphate
  modified_base 18: mod_base = OTHER; note = 2'-O-methyluridine-3'-phosphate
  modified_base 19: mod_base = OTHER; note = 2'-O-methylguanosine-3'-phosphate
  modified_base 20: mod_base = OTHER; note = 2'-O-methyluridine-3'-phosphate
  modified_base 21: mod_base = OTHER; note = 2'-O-methyluridine-3'-phosphate N-[tris(GalNAc-alkyl)-amidodecanoyl)]-4-hydroxyprolinol (Hyp-(GalNAc-alkyl)3)
ggggaggcaagaaccagtgtt

SEQ ID NO: 3361 - RNA, 21 nt, synthetic construct
  source 1..21: mol_type = other RNA
  modified_base 1: mod_base = OTHER; note = 2'-O-methylguanosine-3'-phosphorothioate
  modified_base 2: mod_base = OTHER; note = 2'-O-methylguanosine-3'-phosphorothioate
  modified_base 3: mod_base = OTHER; note = 2'-O-methylguanosine-3'-phosphate
  modified_base 4: mod_base = OTHER; note = 2'-O-methyladenosine-3'-phosphate
  modified_base 5: mod_base = OTHER; note = 2'-O-methylguanosine-3'-phosphate
  modified_base 6: mod_base = OTHER; note = 2'-O-methylguanosine-3'-phosphate
  modified_base 7: mod_base = OTHER; note = 2'-O-methylcytidine-3'-phosphate
  modified_base 8: mod_base = OTHER; note = 2'-O-methyladenosine-3'-phosphate
  modified_base 9: mod_base = OTHER; note = 2'-fluoroadenosine-3'-phosphate
  modified_base 10: mod_base = OTHER; note = 2'-fluoroguanosine-3'-phosphate
  modified_base 11: mod_base = OTHER; note = 2'-fluoroadenosine-3'-phosphate
  modified_base 12: mod_base = OTHER; note = 2'-O-methyladenosine-3'-phosphate
  modified_base 13: mod_base = OTHER; note = 2'-O-methylcytidine-3'-phosphate
  modified_base 14: mod_base = OTHER; note = 2'-O-methylcytidine-3'-phosphate
  modified_base 15: mod_base = OTHER; note = 2'-O-methyladenosine-3'-phosphate
  modified_base 16: mod_base = OTHER; note = 2'-O-methylguanosine-3'-phosphate
  modified_base 17: mod_base = OTHER; note = 2'-O-methyluridine-3'-phosphate
  modified_base 18: mod_base = OTHER; note = 2'-O-methylguanosine-3'-phosphate
  modified_base 19: mod_base = OTHER; note = 2'-O-methyluridine-3'-phosphate
  modified_base 20: mod_base = OTHER; note = 2'-O-methyluridine-3'-phosphate
  modified_base 21: mod_base = OTHER; note = 2'-O-methyluridine-3'-phosphate N-[tris(GalNAc-alkyl)-amidodecanoyl)]-4-hydroxyprolinol (Hyp-(GalNAc-alkyl)3)
gggaggcaagaaccagtgttt

SEQ ID NO: 3362 - RNA, 21 nt, synthetic construct
  source 1..21: mol_type = other RNA
  modified_base 1: mod_base = OTHER; note = 2'-O-methylguanosine-3'-phosphorothioate
  modified_base 2: mod_base = OTHER; note = 2'-O-methylguanosine-3'-phosphorothioate
  modified_base 3: mod_base = OTHER; note = 2'-O-methyladenosine-3'-phosphate
  modified_base 4: mod_base = OTHER; note = 2'-O-methylguanosine-3'-phosphate
  modified_base 5: mod_base = OTHER; note = 2'-O-methylguanosine-3'-phosphate
  modified_base 6: mod_base = OTHER; note = 2'-O-methylcytidine-3'-phosphate
  modified_base 7: mod_base = OTHER; note = 2'-O-methyladenosine-3'-phosphate
  modified_base 8: mod_base = OTHER; note = 2'-O-methyladenosine-3'-phosphate
  modified_base 9: mod_base = OTHER; note = 2'-fluoroguanosine-3'-phosphate
  modified_base 10: mod_base = OTHER; note = 2'-fluoroadenosine-3'-phosphate
  modified_base 11: mod_base = OTHER; note = 2'-fluoroadenosine-3'-phosphate
  modified_base 12: mod_base = OTHER; note = 2'-O-methylcytidine-3'-phosphate
  modified_base 13: mod_base = OTHER; note = 2'-O-methylcytidine-3'-phosphate
  modified_base 14: mod_base = OTHER; note = 2'-O-methyladenosine-3'-phosphate
  modified_base 15: mod_base = OTHER; note = 2'-O-methylguanosine-3'-phosphate
  modified_base 16: mod_base = OTHER; note = 2'-O-methyluridine-3'-phosphate
  modified_base 17: mod_base = OTHER; note = 2'-O-methylguanosine-3'-phosphate
  modified_base 18: mod_base = OTHER; note = 2'-O-methyluridine-3'-phosphate
  modified_base 19: mod_base = OTHER; note = 2'-O-methyluridine-3'-phosphate
  modified_base 20: mod_base = OTHER; note = 2'-O-methyluridine-3'-phosphate
  modified_base 21: mod_base = OTHER; note = 2'-O-methyluridine-3'-phosphate N-[tris(GalNAc-alkyl)-amidodecanoyl)]-4-hydroxyprolinol (Hyp-(GalNAc-alkyl)3)
ggaggcaagaaccagtgtttt

SEQ ID NO: 3363 - RNA, 21 nt, synthetic construct
  source 1..21: mol_type = other RNA
  modified_base 1: mod_base = OTHER; note = 2'-O-methylguanosine-3'-phosphorothioate
  modified_base 2: mod_base = OTHER; note = 2'-O-methylcytidine-3'-phosphorothioate
  modified_base 3: mod_base = OTHER; note = 2'-O-methyluridine-3'-phosphate
  modified_base 4: mod_base = OTHER; note = 2'-O-methyluridine-3'-phosphate
  modified_base 5: mod_base = OTHER; note = 2'-O-methylguanosine-3'-phosphate
  modified_base 6: mod_base = OTHER; note = 2'-O-methyluridine-3'-phosphate
  modified_base 7: mod_base = OTHER; note = 2'-fluorouridine-3'-phosphate
  modified_base 8: mod_base = OTHER; note = 2'-O-methyluridine-3'-phosphate
  modified_base 9: mod_base = OTHER; note = 2'-fluoroguanosine-3'-phosphate
  modified_base 10: mod_base = OTHER; note = 2'-fluorouridine-3'-phosphate
  modified_base 11: mod_base = OTHER; note = 2'-fluoroguanosine-3'-phosphate
  modified_base 12: mod_base = OTHER; note = 2'-O-methyladenosine-3'-phosphate
  modified_base 13: mod_base = OTHER; note = 2'-O-methyladenosine-3'-phosphate
  modified_base 14: mod_base = OTHER; note = 2'-O-methyladenosine-3'-phosphate
  modified_base 15: mod_base = OTHER; note = 2'-O-methylcytidine-3'-phosphate
  modified_base 16: mod_base = OTHER; note = 2'-O-methyladenosine-3'-phosphate
  modified_base 17: mod_base = OTHER; note = 2'-O-methyladenosine-3'-phosphate
  modified_base 18: mod_base = OTHER; note = 2'-O-methyladenosine-3'-phosphate
  modified_base 19: mod_base = OTHER; note = 2'-O-methyladenosine-3'-phosphate
  modified_base 20: mod_base = OTHER; note = 2'-O-methyladenosine-3'-phosphate
  modified_base 21: mod_base = OTHER; note = 2'-O-methyluridine-3'-phosphate N-[tris(GalNAc-alkyl)-amidodecanoyl)]-4-hydroxyprolinol (Hyp-(GalNAc-alkyl)3)
gcttgtttgtgaaacaaaaat

SEQ ID NO: 3364 - RNA, 21 nt, synthetic construct
  source 1..21: mol_type = other RNA
  modified_base 1: mod_base = OTHER; note = 2'-O-methylcytidine-3'-phosphorothioate
  modified_base 2: mod_base = OTHER; note = 2'-O-methyluridine-3'-phosphorothioate
  modified_base 3: mod_base = OTHER; note = 2'-O-methyluridine-3'-phosphate
  modified_base 4: mod_base = OTHER; note = 2'-O-methylguanosine-3'-phosphate
  modified_base 5: mod_base = OTHER; note = 2'-O-methyluridine-3'-phosphate
  modified_base 6: mod_base = OTHER; note = 2'-O-methyluridine-3'-phosphate
  modified_base 7: mod_base = OTHER; note = 2'-fluorouridine-3'-phosphate
  modified_base 8: mod_base = OTHER; note = 2'-O-methylguanosine-3'-phosphate
  modified_base 9: mod_base = OTHER; note = 2'-fluorouridine-3'-phosphate
  modified_base 10: mod_base = OTHER; note = 2'-fluoroguanosine-3'-phosphate
  modified_base 11: mod_base = OTHER; note = 2'-fluoroadenosine-3'-phosphate
  modified_base 12: mod_base = OTHER; note = 2'-O-methyladenosine-3'-phosphate
  modified_base 13: mod_base = OTHER; note = 2'-O-methyladenosine-3'-phosphate
  modified_base 14: mod_base = OTHER; note = 2'-O-methylcytidine-3'-phosphate
  modified_base 15: mod_base = OTHER; note = 2'-O-methyladenosine-3'-phosphate
  modified_base 16: mod_base = OTHER; note = 2'-O-methyladenosine-3'-phosphate
  modified_base 17: mod_base = OTHER; note = 2'-O-methyladenosine-3'-phosphate
  modified_base 18: mod_base = OTHER; note = 2'-O-methyladenosine-3'-phosphate
  modified_base 19: mod_base = OTHER; note = 2'-O-methyladenosine-3'-phosphate
  modified_base 20: mod_base = OTHER; note = 2'-O-methyladenosine-3'-phosphate
  modified_base 21: mod_base = OTHER; note = 2'-O-methyluridine-3'-phosphate N-[tris(GalNAc-alkyl)-amidodecanoyl)]-4-hydroxyprolinol (Hyp-(GalNAc-alkyl)3)
cttgtttgtgaaacaaaaaat

SEQ ID NO: 3365 - RNA, 21 nt, synthetic construct
  source 1..21: mol_type = other RNA
  modified_base 1: mod_base = OTHER; note = 2'-O-methyluridine-3'-phosphorothioate
  modified_base 2: mod_base = OTHER; note = 2'-O-methyluridine-3'-phosphorothioate
  modified_base 3: mod_base = OTHER; note = 2'-O-methylguanosine-3'-phosphate
  modified_base 4: mod_base = OTHER; note = 2'-O-methyluridine-3'-phosphate
  modified_base 5: mod_base = OTHER; note = 2'-O-methyluridine-3'-phosphate
  modified_base 6: mod_base = OTHER; note = 2'-O-methyluridine-3'-phosphate
  modified_base 7: mod_base = OTHER; note = 2'-fluoroguanosine-3'-phosphate
  modified_base 8: mod_base = OTHER; note = 2'-O-methyluridine-3'-phosphate
  modified_base 9: mod_base = OTHER; note = 2'-fluoroguanosine-3'-phosphate
  modified_base 10: mod_base = OTHER; note = 2'-fluoroadenosine-3'-phosphate
  modified_base 11: mod_base = OTHER; note = 2'-fluoroadenosine-3'-phosphate
  modified_base 12: mod_base = OTHER; note = 2'-O-methyladenosine-3'-phosphate
  modified_base 13: mod_base = OTHER; note = 2'-O-methylcytidine-3'-phosphate
  modified_base 14: mod_base = OTHER; note = 2'-O-methyladenosine-3'-phosphate
  modified_base 15: mod_base = OTHER; note = 2'-O-methyladenosine-3'-phosphate
  modified_base 16: mod_base = OTHER; note = 2'-O-methyladenosine-3'-phosphate
  modified_base 17: mod_base = OTHER; note = 2'-O-methyladenosine-3'-phosphate
  modified_base 18: mod_base = OTHER; note = 2'-O-methyladenosine-3'-phosphate
  modified_base 19: mod_base = OTHER; note = 2'-O-methyladenosine-3'-phosphate
  modified_base 20: mod_base = OTHER; note = 2'-O-methylguanosine-3'-phosphate
  modified_base 21: mod_base = OTHER; note = 2'-O-methyluridine-3'-phosphate N-[tris(GalNAc-alkyl)-amidodecanoyl)]-4-hydroxyprolinol (Hyp-(GalNAc-alkyl)3)
ttgtttgtgaaacaaaaaagt

SEQ ID NO: 3366 - RNA, 21 nt, synthetic construct
  source 1..21: mol_type = other RNA
  modified_base 1: mod_base = OTHER; note = 2'-O-methylcytidine-3'-phosphorothioate
  modified_base 2: mod_base = OTHER; note = 2'-O-methyluridine-3'-phosphorothioate
  modified_base 3: mod_base = OTHER; note = 2'-O-methyluridine-3'-phosphate
  modified_base 4: mod_base = OTHER; note = 2'-O-methyladenosine-3'-phosphate
  modified_base 5: mod_base = OTHER; note = 2'-O-methylguanosine-3'-phosphate
  modified_base 6: mod_base = OTHER; note = 2'-O-methyluridine-3'-phosphate
  modified_base 7: mod_base = OTHER; note = 2'-fluorouridine-3'-phosphate
  modified_base 8: mod_base = OTHER; note = 2'-O-methyluridine-3'-phosphate
  modified_base 9: mod_base = OTHER; note = 2'-fluorouridine-3'-phosphate
  modified_base 10: mod_base = OTHER; note = 2'-fluorouridine-3'-phosphate
  modified_base 11: mod_base = OTHER; note = 2'-fluorouridine-3'-phosphate
  modified_base 12: mod_base = OTHER; note = 2'-O-methylcytidine-3'-phosphate
  modified_base 13: mod_base = OTHER; note = 2'-O-methylcytidine-3'-phosphate
  modified_base 14: mod_base = OTHER; note = 2'-O-methyladenosine-3'-phosphate
  modified_base 15: mod_base = OTHER; note = 2'-O-methylcytidine-3'-phosphate
  modified_base 16: mod_base = OTHER; note = 2'-O-methyladenosine-3'-phosphate
  modified_base 17: mod_base = OTHER; note = 2'-O-methylguanosine-3'-phosphate
  modified_base 18: mod_base = OTHER; note = 2'-O-methyladenosine-3'-phosphate
  modified_base 19: mod_base = OTHER; note = 2'-O-methyluridine-3'-phosphate
  modified_base 20: mod_base = OTHER; note = 2'-O-methylguanosine-3'-phosphate
  modified_base 21: mod_base = OTHER; note = 2'-O-methyluridine-3'-phosphate N-[tris(GalNAc-alkyl)-amidodecanoyl)]-4-hydroxyprolinol (Hyp-(GalNAc-alkyl)3)
cttagttttttccacagatgt

SEQ ID NO: 3367 - RNA, 21 nt, synthetic construct
  source 1..21: mol_type = other RNA
  modified_base 1: mod_base = OTHER; note = 2'-O-methyluridine-3'-phosphorothioate
  modified_base 2: mod_base = OTHER; note = 2'-O-methyluridine-3'-phosphorothioate
  modified_base 3: mod_base = OTHER; note = 2'-O-methyladenosine-3'-phosphate
  modified_base 4: mod_base = OTHER; note = 2'-O-methylguanosine-3'-phosphate
  modified_base 5: mod_base = OTHER; note = 2'-O-methyluridine-3'-phosphate
  modified_base 6: mod_base = OTHER; note = 2'-O-methyluridine-3'-phosphate
  modified_base 7: mod_base = OTHER; note = 2'-fluorouridine-3'-phosphate
  modified_base 8: mod_base = OTHER; note = 2'-O-methyluridine-3'-phosphate
  modified_base 9: mod_base = OTHER; note = 2'-fluorouridine-3'-phosphate
  modified_base 10: mod_base = OTHER; note = 2'-fluorouridine-3'-phosphate
  modified_base 11: mod_base = OTHER; note = 2'-fluorocytidine-3'-phosphate
  modified_base 12: mod_base = OTHER; note = 2'-O-methylcytidine-3'-phosphate
  modified_base 13: mod_base = OTHER; note = 2'-O-methyladenosine-3'-phosphate
  modified_base 14: mod_base = OTHER; note = 2'-O-methylcytidine-3'-phosphate
  modified_base 15: mod_base = OTHER; note = 2'-O-methyladenosine-3'-phosphate
  modified_base 16: mod_base = OTHER; note = 2'-O-methylguanosine-3'-phosphate
  modified_base 17: mod_base = OTHER; note = 2'-O-methyladenosine-3'-phosphate
  modified_base 18: mod_base = OTHER; note = 2'-O-methyluridine-3'-phosphate
  modified_base 19: mod_base = OTHER; note = 2'-O-methylguanosine-3'-phosphate
  modified_base 20: mod_base = OTHER; note = 2'-O-methylcytidine-3'-phosphate
  modified_base 21: mod_base = OTHER; note = 2'-O-methyluridine-3'-phosphate N-[tris(GalNAc-alkyl)-amidodecanoyl)]-4-hydroxyprolinol (Hyp-(GalNAc-alkyl)3)
ttagttttttccacagatgct

SEQ ID NO: 3368 - RNA, 21 nt, synthetic construct
  source 1..21: mol_type = other RNA
  modified_base 1: mod_base = OTHER; note = 2'-O-methyluridine-3'-phosphorothioate
  modified_base 2: mod_base = OTHER; note = 2'-O-methyladenosine-3'-phosphorothioate
  modified_base 3: mod_base = OTHER; note = 2'-O-methylguanosine-3'-phosphate
  modified_base 4: mod_base = OTHER; note = 2'-O-methyluridine-3'-phosphate
  modified_base 5: mod_base = OTHER; note = 2'-O-methyluridine-3'-phosphate
  modified_base 6: mod_base = OTHER; note = 2'-O-methyluridine-3'-phosphate
  modified_base 7: mod_base = OTHER; note = 2'-fluorouridine-3'-phosphate
  modified_base 8: mod_base = OTHER; note = 2'-O-methyluridine-3'-phosphate
  modified_base 9: mod_base = OTHER; note = 2'-fluorouridine-3'-phosphate
  modified_base 10: mod_base = OTHER; note = 2'-fluorocytidine-3'-phosphate
  modified_base 11: mod_base = OTHER; note = 2'-fluorocytidine-3'-phosphate
  modified_base 12: mod_base = OTHER; note = 2'-O-methyladenosine-3'-phosphate
  modified_base 13: mod_base = OTHER; note = 2'-O-methylcytidine-3'-phosphate
  modified_base 14: mod_base = OTHER; note = 2'-O-methyladenosine-3'-phosphate
  modified_base 15: mod_base = OTHER; note = 2'-O-methylguanosine-3'-phosphate
  modified_base 16: mod_base = OTHER; note = 2'-O-methyladenosine-3'-phosphate
  modified_base 17: mod_base = OTHER; note = 2'-O-methyluridine-3'-phosphate
  modified_base 18: mod_base = OTHER; note = 2'-O-methylguanosine-3'-phosphate
  modified_base 19: mod_base = OTHER; note = 2'-O-methylcytidine-3'-phosphate
  modified_base 20: mod_base = OTHER; note = 2'-O-methyluridine-3'-phosphate
  modified_base 21: mod_base = OTHER; note = 2'-O-methyluridine-3'-phosphate N-[tris(GalNAc-alkyl)-amidodecanoyl)]-4-hydroxyprolinol (Hyp-(GalNAc-alkyl)3)
tagttttttccacagatgctt

SEQ ID NO: 3369 - RNA, 21 nt, synthetic construct
  source 1..21: mol_type = other RNA
  modified_base 1: mod_base = OTHER; note = 2'-O-methylguanosine-3'-phosphorothioate
  modified_base 2: mod_base = OTHER; note = 2'-O-methyluridine-3'-phosphorothioate
  modified_base 3: mod_base = OTHER; note = 2'-O-methyluridine-3'-phosphate
  modified_base 4: mod_base = OTHER; note = 2'-O-methyluridine-3'-phosphate
  modified_base 5: mod_base = OTHER; note = 2'-O-methyluridine-3'-phosphate
  modified_base 6: mod_base = OTHER; note = 2'-O-methyluridine-3'-phosphate
  modified_base 7: mod_base = OTHER; note = 2'-fluorouridine-3'-phosphate
  modified_base 8: mod_base = OTHER; note = 2'-O-methylcytidine-3'-phosphate
  modified_base 9: mod_base = OTHER; note = 2'-fluorocytidine-3'-phosphate
  modified_base 10: mod_base = OTHER; note = 2'-fluoroadenosine-3'-phosphate
  modified_base 11: mod_base = OTHER; note = 2'-fluorocytidine-3'-phosphate
  modified_base 12: mod_base = OTHER; note = 2'-O-methyladenosine-3'-phosphate
  modified_base 13: mod_base = OTHER; note = 2'-O-methylguanosine-3'-phosphate
  modified_base 14: mod_base = OTHER; note = 2'-O-methyladenosine-3'-phosphate
  modified_base 15: mod_base = OTHER; note = 2'-O-methyluridine-3'-phosphate
  modified_base 16: mod_base = OTHER; note = 2'-O-methylguanosine-3'-phosphate
  modified_base 17: mod_base = OTHER; note = 2'-O-methylcytidine-3'-phosphate
  modified_base 18: mod_base = OTHER; note = 2'-O-methyluridine-3'-phosphate
  modified_base 19: mod_base = OTHER; note = 2'-O-methyluridine-3'-phosphate
  modified_base 20: mod_base = OTHER; note = 2'-O-methylguanosine-3'-phosphate
  modified_base 21: mod_base = OTHER; note = 2'-O-methyluridine-3'-phosphate N-[tris(GalNAc-alkyl)-amidodecanoyl)]-4-hydroxyprolinol (Hyp-(GalNAc-alkyl)3)
gttttttccacagatgcttgt

SEQ ID NO: 3370 - RNA, 21 nt, synthetic construct
  source 1..21: mol_type = other RNA
  modified_base 1: mod_base = OTHER; note = 2'-O-methyluridine-3'-phosphorothioate
  modified_base 2: mod_base = OTHER; note = 2'-O-methyluridine-3'-phosphorothioate
  modified_base 3: mod_base = OTHER; note = 2'-O-methyluridine-3'-phosphate
  modified_base 4: mod_base = OTHER; note = 2'-O-methyluridine-3'-phosphate
  modified_base 5: mod_base = OTHER; note = 2'-O-methyluridine-3'-phosphate
  modified_base 6: mod_base = OTHER; note = 2'-O-methylcytidine-3'-phosphate
  modified_base 7: mod_base = OTHER; note = 2'-fluorocytidine-3'-phosphate
  modified_base 8: mod_base = OTHER; note = 2'-O-methyladenosine-3'-phosphate
  modified_base 9: mod_base = OTHER; note = 2'-fluorocytidine-3'-phosphate
  modified_base 10: mod_base = OTHER; note = 2'-fluoroadenosine-3'-phosphate
  modified_base 11: mod_base = OTHER; note = 2'-fluoroguanosine-3'-phosphate
  modified_base 12: mod_base = OTHER; note = 2'-O-methyladenosine-3'-phosphate
  modified_base 13: mod_base = OTHER; note = 2'-O-methyluridine-3'-phosphate
  modified_base 14: mod_base = OTHER; note = 2'-O-methylguanosine-3'-phosphate
  modified_base 15: mod_base = OTHER; note = 2'-O-methylcytidine-3'-phosphate
  modified_base 16: mod_base = OTHER; note = 2'-O-methyluridine-3'-phosphate
  modified_base 17: mod_base = OTHER; note = 2'-O-methyluridine-3'-phosphate
  modified_base 18: mod_base = OTHER; note = 2'-O-methylguanosine-3'-phosphate
  modified_base 19: mod_base = OTHER; note = 2'-O-methyluridine-3'-phosphate
  modified_base 20: mod_base = OTHER; note = 2'-O-methylguanosine-3'-phosphate
  modified_base 21: mod_base = OTHER; note = 2'-O-methyluridine-3'-phosphate N-[tris(GalNAc-alkyl)-amidodecanoyl)]-4-hydroxyprolinol (Hyp-(GalNAc-alkyl)3)
tttttccacagatgcttgtgt

SEQ ID NO: 3371 - RNA, 21 nt, synthetic construct
  source 1..21: mol_type = other RNA
  modified_base 1: mod_base = OTHER; note = 2'-O-methyluridine-3'-phosphorothioate
  modified_base 2: mod_base = OTHER; note = 2'-O-methyluridine-3'-phosphorothioate
  modified_base 3: mod_base = OTHER; note = 2'-O-methyluridine-3'-phosphate
  modified_base 4: mod_base = OTHER; note = 2'-O-methyluridine-3'-phosphate
  modified_base 5: mod_base = OTHER; note = 2'-O-methylcytidine-3'-phosphate
  modified_base 6: mod_base = OTHER; note = 2'-O-methylcytidine-3'-phosphate
  modified_base 7: mod_base = OTHER; note = 2'-fluoroadenosine-3'-phosphate
  modified_base 8: mod_base = OTHER; note = 2'-O-methylcytidine-3'-phosphate
  modified_base 9: mod_base = OTHER; note = 2'-fluoroadenosine-3'-phosphate
  modified_base 10: mod_base = OTHER; note = 2'-fluoroguanosine-3'-phosphate
  modified_base 11: mod_base = OTHER; note = 2'-fluoroadenosine-3'-phosphate
  modified_base 12: mod_base = OTHER; note = 2'-O-methyluridine-3'-phosphate
  modified_base 13: mod_base = OTHER; note = 2'-O-methylguanosine-3'-phosphate
  modified_base 14: mod_base = OTHER; note = 2'-O-methylcytidine-3'-phosphate
  modified_base 15: mod_base = OTHER; note = 2'-O-methyluridine-3'-phosphate
  modified_base 16: mod_base = OTHER; note = 2'-O-methyluridine-3'-phosphate
  modified_base 17: mod_base = OTHER; note = 2'-O-methylguanosine-3'-phosphate
  modified_base 18: mod_base = OTHER; note = 2'-O-methyluridine-3'-phosphate
  modified_base 19: mod_base = OTHER; note = 2'-O-methylguanosine-3'-phosphate
  modified_base 20: mod_base = OTHER; note = 2'-O-methyladenosine-3'-phosphate
  modified_base 21: mod_base = OTHER; note = 2'-O-methyluridine-3'-phosphate N-[tris(GalNAc-alkyl)-amidodecanoyl)]-4-hydroxyprolinol (Hyp-(GalNAc-alkyl)3)
ttttccacagatgcttgtgat

SEQ ID NO: 3372 - RNA, 21 nt, synthetic construct
  source 1..21: mol_type = other RNA
  modified_base 1: mod_base = OTHER; note = 2'-O-methyluridine-3'-phosphorothioate
  modified_base 2: mod_base = OTHER; note = 2'-O-methylcytidine-3'-phosphorothioate
  modified_base 3: mod_base = OTHER; note = 2'-O-methyluridine-3'-phosphate
  modified_base 4: mod_base = OTHER; note = 2'-O-methylcytidine-3'-phosphate
  modified_base 5: mod_base = OTHER; note = 2'-O-methylcytidine-3'-phosphate
  modified_base 6: mod_base = OTHER; note = 2'-O-methylcytidine-3'-phosphate
  modified_base 7: mod_base = OTHER; note = 2'-fluoroadenosine-3'-phosphate
  modified_base 8: mod_base = OTHER; note = 2'-O-methylcytidine-3'-phosphate
  modified_base 9: mod_base = OTHER; note = 2'-fluorocytidine-3'-phosphate
  modified_base 10: mod_base = OTHER; note = 2'-fluorouridine-3'-phosphate
  modified_base 11: mod_base = OTHER; note = 2'-fluorouridine-3'-phosphate
  modified_base 12: mod_base = OTHER; note = 2'-O-methyluridine-3'-phosphate
  modified_base 13: mod_base = OTHER; note = 2'-O-methyluridine-3'-phosphate
  modified_base 14: mod_base = OTHER; note = 2'-O-methylcytidine-3'-phosphate
  modified_base 15: mod_base = OTHER; note = 2'-O-methyluridine-3'-phosphate
  modified_base 16: mod_base = OTHER; note = 2'-O-methyluridine-3'-phosphate
  modified_base 17: mod_base = OTHER; note = 2'-O-methylcytidine-3'-phosphate
  modified_base 18: mod_base = OTHER; note = 2'-O-methyluridine-3'-phosphate
  modified_base 19: mod_base = OTHER; note = 2'-O-methyladenosine-3'-phosphate
  modified_base 20: mod_base = OTHER; note = 2'-O-methyladenosine-3'-phosphate
  modified_base 21: mod_base = OTHER; note = 2'-O-methyluridine-3'-phosphate N-[tris(GalNAc-alkyl)-amidodecanoyl)]-4-hydroxyprolinol (Hyp-(GalNAc-alkyl)3)
tctcccaccttttcttctaat

SEQ ID NO: 3373 - RNA, 21 nt, synthetic construct
  source 1..21: mol_type = other RNA
  modified_base 1: mod_base = OTHER; note = 2'-O-methyluridine-3'-phosphorothioate
  modified_base 2: mod_base = OTHER; note = 2'-O-methyluridine-3'-phosphorothioate
  modified_base 3: mod_base = OTHER; note = 2'-O-methylcytidine-3'-phosphate
  modified_base 4: mod_base = OTHER; note = 2'-O-methylcytidine-3'-phosphate
  modified_base 5: mod_base = OTHER; note = 2'-O-methyladenosine-3'-phosphate
  modified_base 6: mod_base = OTHER; note = 2'-O-methyladenosine-3'-phosphate
  modified_base 7: mod_base = OTHER; note = 2'-fluorocytidine-3'-phosphate
  modified_base 8: mod_base = OTHER; note = 2'-O-methylcytidine-3'-phosphate
  modified_base 9: mod_base = OTHER; note = 2'-fluoroguanosine-3'-phosphate
  modified_base 10: mod_base = OTHER; note = 2'-fluoroadenosine-3'-phosphate
  modified_base 11: mod_base = OTHER; note = 2'-fluorocytidine-3'-phosphate
  modified_base 12: mod_base = OTHER; note = 2'-O-methylcytidine-3'-phosphate
  modified_base 13: mod_base = OTHER; note = 2'-O-methyladenosine-3'-phosphate
  modified_base 14: mod_base = OTHER; note = 2'-O-methylguanosine-3'-phosphate
  modified_base 15: mod_base = OTHER; note = 2'-O-methylcytidine-3'-phosphate
  modified_base 16: mod_base = OTHER; note = 2'-O-methyluridine-3'-phosphate
  modified_base 17: mod_base = OTHER; note = 2'-O-methyluridine-3'-phosphate
  modified_base 18: mod_base = OTHER; note = 2'-O-methylguanosine-3'-phosphate
  modified_base 19: mod_base = OTHER; note = 2'-O-methyluridine-3'-phosphate
  modified_base 20: mod_base = OTHER; note = 2'-O-methyluridine-3'-phosphate
  modified_base 21: mod_base = OTHER; note = 2'-O-methyluridine-3'-phosphate N-[tris(GalNAc-alkyl)-amidodecanoyl)]-4-hydroxyprolinol (Hyp-(GalNAc-alkyl)3)
ttccaaccgaccagcttgttt

SEQ ID NO: 3374 - RNA, 21 nt, synthetic construct
  source 1..21: mol_type = other RNA
  modified_base 1: mod_base = OTHER; note = 2'-O-methylcytidine-3'-phosphorothioate
  modified_base 2: mod_base = OTHER; note = 2'-O-methylcytidine-3'-phosphorothioate
  modified_base 3: mod_base = OTHER; note = 2'-O-methyladenosine-3'-phosphate
  modified_base 4: mod_base = OTHER; note = 2'-O-methylcytidine-3'-phosphate
  modified_base 5: mod_base = OTHER; note = 2'-O-methylcytidine-3'-phosphate
  modified_base 6: mod_base = OTHER; note = 2'-O-methyluridine-3'-phosphate
  modified_base 7: mod_base = OTHER; note = 2'-fluorouridine-3'-phosphate
  modified_base 8: mod_base = OTHER; note = 2'-O-methyluridine-3'-phosphate
  modified_base 9: mod_base = OTHER; note = 2'-fluorouridine-3'-phosphate
  modified_base 10: mod_base = OTHER; note = 2'-fluorocytidine-3'-phosphate
  modified_base 11: mod_base = OTHER; note = 2'-fluorouridine-3'-phosphate
  modified_base 12: mod_base = OTHER; note = 2'-O-methyluridine-3'-phosphate
  modified_base 13: mod_base = OTHER; note = 2'-O-methylcytidine-3'-phosphate
  modified_base 14: mod_base = OTHER; note = 2'-O-methyluridine-3'-phosphate
  modified_base 15: mod_base = OTHER; note = 2'-O-methyladenosine-3'-phosphate
  modified_base 16: mod_base = OTHER; note = 2'-O-methyladenosine-3'-phosphate
  modified_base 17: mod_base = OTHER; note = 2'-O-methyluridine-3'-phosphate
  modified_base 18: mod_base = OTHER; note = 2'-O-methylguanosine-3'-phosphate
  modified_base 19: mod_base = OTHER; note = 2'-O-methyladenosine-3'-phosphate
  modified_base 20: mod_base = OTHER; note = 2'-O-methylguanosine-3'-phosphate
  modified_base 21: mod_base = OTHER; note = 2'-O-methyluridine-3'-phosphate N-[tris(GalNAc-alkyl)-amidodecanoyl)]-4-hydroxyprolinol (Hyp-(GalNAc-alkyl)3)
ccaccttttcttctaatgagt

SEQ ID NO: 3375 - RNA, 21 nt, synthetic construct
  source 1..21: mol_type = other RNA
  modified_base 1: mod_base = OTHER; note = 2'-O-methylcytidine-3'-phosphorothioate
  modified_base 2: mod_base = OTHER; note = 2'-O-methylcytidine-3'-phosphorothioate
  modified_base 3: mod_base = OTHER; note = 2'-O-methyluridine-3'-phosphate
  modified_base 4: mod_base = OTHER; note = 2'-O-methylcytidine-3'-phosphate
  modified_base 5: mod_base = OTHER; note = 2'-O-methyladenosine-3'-phosphate
  modified_base 6: mod_base = OTHER; note = 2'-O-methyladenosine-3'-phosphate
  modified_base 7: mod_base = OTHER; note = 2'-fluorocytidine-3'-phosphate
  modified_base 8: mod_base = OTHER; note = 2'-O-methyluridine-3'-phosphate
  modified_base 9: mod_base = OTHER; note = 2'-fluoroguanosine-3'-phosphate
  modified_base 10: mod_base = OTHER; note = 2'-fluoroguanosine-3'-phosphate
  modified_base 11: mod_base = OTHER; note = 2'-fluoroadenosine-3'-phosphate
  modified_base 12: mod_base = OTHER; note = 2'-O-methyluridine-3'-phosphate
  modified_base 13: mod_base = OTHER; note = 2'-O-methylguanosine-3'-phosphate
  modified_base 14: mod_base = OTHER; note = 2'-O-methyladenosine-3'-phosphate
  modified_base 15: mod_base = OTHER; note = 2'-O-methyladenosine-3'-phosphate
  modified_base 16: mod_base = OTHER; note = 2'-O-methylguanosine-3'-phosphate
  modified_base 17: mod_base = OTHER; note = 2'-O-methyladenosine-3'-phosphate
  modified_base 18: mod_base = OTHER; note = 2'-O-methyladenosine-3'-phosphate
  modified_base 19: mod_base = OTHER; note = 2'-O-methyladenosine-3'-phosphate
  modified_base 20: mod_base = OTHER; note = 2'-O-methylcytidine-3'-phosphate
  modified_base 21: mod_base = OTHER; note = 2'-O-methyluridine-3'-phosphate N-[tris(GalNAc-alkyl)-amidodecanoyl)]-4-hydroxyprolinol (Hyp-(GalNAc-alkyl)3)
cctcaactggatgaagaaact

SEQ ID NO: 3376 - RNA, 21 nt, synthetic construct
  source 1..21: mol_type = other RNA
  modified_base 1: mod_base = OTHER; note = 2'-O-methylcytidine-3'-phosphorothioate
  modified_base 2: mod_base = OTHER; note = 2'-O-methylcytidine-3'-phosphorothioate
  modified_base 3: mod_base = OTHER; note = 2'-O-methyladenosine-3'-phosphate
  modified_base 4: mod_base = OTHER; note = 2'-O-methyluridine-3'-phosphate
  modified_base 5: mod_base = OTHER; note = 2'-O-methyluridine-3'-phosphate
  modified_base 6: mod_base = OTHER; note = 2'-O-methylcytidine-3'-phosphate
  modified_base 7: mod_base = OTHER; note = 2'-fluorocytidine-3'-phosphate
  modified_base 8: mod_base = OTHER; note = 2'-O-methyluridine-3'-phosphate
  modified_base 9: mod_base = OTHER; note = 2'-fluoroguanosine-3'-phosphate
  modified_base 10: mod_base = OTHER; note = 2'-fluorouridine-3'-phosphate
  modified_base 11: mod_base = OTHER; note = 2'-fluorouridine-3'-phosphate
  modified_base 12: mod_base = OTHER; note = 2'-O-methyluridine-3'-phosphate
  modified_base 13: mod_base = OTHER; note = 2'-O-methylguanosine-3'-phosphate
  modified_base 14: mod_base = OTHER; note = 2'-O-methylcytidine-3'-phosphate
  modified_base 15: mod_base = OTHER; note = 2'-O-methyluridine-3'-phosphate
  modified_base 16: mod_base = OTHER; note = 2'-O-methylguanosine-3'-phosphate
  modified_base 17: mod_base = OTHER; note = 2'-O-methyluridine-3'-phosphate
  modified_base 18: mod_base = OTHER; note = 2'-O-methylguanosine-3'-phosphate
  modified_base 19: mod_base = OTHER; note = 2'-O-methyluridine-3'-phosphate
  modified_base 20: mod_base = OTHER; note = 2'-O-methyladenosine-3'-phosphate
  modified_base 21: mod_base = OTHER; note = 2'-O-methyluridine-3'-phosphate N-[tris(GalNAc-alkyl)-amidodecanoyl)]-4-hydroxyprolinol (Hyp-(GalNAc-alkyl)3)
ccattcctgtttgctgtgtat

SEQ ID NO: 3377 - RNA, 21 nt, synthetic construct
  source 1..21: mol_type = other RNA
  modified_base 1: mod_base = OTHER; note = 2'-O-methyladenosine-3'-phosphorothioate
  modified_base 2: mod_base = OTHER; note = 2'-O-methylguanosine-3'-phosphorothioate
  modified_base 3: mod_base = OTHER; note = 2'-O-methyladenosine-3'-phosphate
  modified_base 4: mod_base = OTHER; note = 2'-O-methyladenosine-3'-phosphate
  modified_base 5: mod_base = OTHER; note = 2'-O-methyluridine-3'-phosphate
  modified_base 6: mod_base = OTHER; note = 2'-O-methyluridine-3'-phosphate
  modified_base 7: mod_base = OTHER; note = 2'-fluorocytidine-3'-phosphate
  modified_base 8: mod_base = OTHER; note = 2'-O-methylcytidine-3'-phosphate
  modified_base 9: mod_base = OTHER; note = 2'-fluoroadenosine-3'-phosphate
  modified_base 10: mod_base = OTHER; note = 2'-fluoroadenosine-3'-phosphate
  modified_base 11: mod_base = OTHER; note = 2'-fluorocytidine-3'-phosphate
  modified_base 12: mod_base = OTHER; note = 2'-O-methylcytidine-3'-phosphate
  modified_base 13: mod_base = OTHER; note = 2'-O-methylguanosine-3'-phosphate
  modified_base 14: mod_base = OTHER; note = 2'-O-methyladenosine-3'-phosphate
  modified_base 15: mod_base = OTHER; note = 2'-O-methylcytidine-3'-phosphate
  modified_base 16: mod_base = OTHER; note = 2'-O-methylcytidine-3'-phosphate
  modified_base 17: mod_base = OTHER; note = 2'-O-methyladenosine-3'-phosphate
  modified_base 18: mod_base = OTHER; note = 2'-O-methylguanosine-3'-phosphate
  modified_base 19: mod_base = OTHER; note = 2'-O-methylcytidine-3'-phosphate
  modified_base 20: mod_base = OTHER; note = 2'-O-methyluridine-3'-phosphate
  modified_base 21: mod_base = OTHER; note = 2'-O-methyluridine-3'-phosphate N-[tris(GalNAc-alkyl)-amidodecanoyl)]-4-hydroxyprolinol (Hyp-(GalNAc-alkyl)3)
agaattccaaccgaccagctt

SEQ ID NO: 3378 - RNA, 21 nt, synthetic construct
  source 1..21: mol_type = other RNA
  modified_base 1: mod_base = OTHER; note = 2'-O-methylguanosine-3'-phosphorothioate
  modified_base 2: mod_base = OTHER; note = 2'-O-methylcytidine-3'-phosphorothioate
  modified_base 3: mod_base = OTHER; note = 2'-O-methyluridine-3'-phosphate
  modified_base 4: mod_base = OTHER; note = 2'-O-methylguanosine-3'-phosphate
  modified_base 5: mod_base = OTHER; note = 2'-O-methylguanosine-3'-phosphate
  modified_base 6: mod_base = OTHER; note = 2'-O-methylguanosine-3'-phosphate
  modified_base 7: mod_base = OTHER; note = 2'-fluorouridine-3'-phosphate
  modified_base 8: mod_base = OTHER; note = 2'-O-methyluridine-3'-phosphate
  modified_base 9: mod_base = OTHER; note = 2'-fluorouridine-3'-phosphate
  modified_base 10: mod_base = OTHER; note = 2'-fluoroadenosine-3'-phosphate
  modified_base 11: mod_base = OTHER; note = 2'-fluorouridine-3'-phosphate
  modified_base 12: mod_base = OTHER; note = 2'-O-methyluridine-3'-phosphate
  modified_base 13: mod_base = OTHER; note = 2'-O-methyluridine-3'-phosphate
  modified_base 14: mod_base = OTHER; note = 2'-O-methyluridine-3'-phosphate
  modified_base 15: mod_base = OTHER; note = 2'-O-methyladenosine-3'-phosphate
  modified_base 16: mod_base = OTHER; note = 2'-O-methylguanosine-3'-phosphate
  modified_base 17: mod_base = OTHER; note = 2'-O-methyladenosine-3'-phosphate
  modified_base 18: mod_base = OTHER; note = 2'-O-methylguanosine-3'-phosphate
  modified_base 19: mod_base = OTHER; note = 2'-O-methyladenosine-3'-phosphate
  modified_base 20: mod_base = OTHER; note = 2'-O-methyladenosine-3'-phosphate
  modified_base 21: mod_base = OTHER; note = 2'-O-methyluridine-3'-phosphate N-[tris(GalNAc-alkyl)-amidodecanoyl)]-4-hydroxyprolinol (Hyp-(GalNAc-alkyl)3)
gctgggtttattttagagaat

SEQ ID NO: 3379 - RNA, 21 nt, synthetic construct
  source 1..21: mol_type = other RNA
  modified_base 1: mod_base = OTHER; note = 2'-O-methyladenosine-3'-phosphorothioate
  modified_base 2: mod_base = OTHER; note = 2'-O-methyluridine-3'-phosphorothioate
  modified_base 3: mod_base = OTHER; note = 2'-O-methylguanosine-3'-phosphate
  modified_base 4: mod_base = OTHER; note = 2'-O-methylguanosine-3'-phosphate
  modified_base 5: mod_base = OTHER; note = 2'-O-methylcytidine-3'-phosphate
  modified_base 6: mod_base = OTHER; note = 2'-O-methyladenosine-3'-phosphate
  modified_base 7: mod_base = OTHER; note = 2'-fluorouridine-3'-phosphate
  modified_base 8: mod_base = OTHER; note = 2'-O-methylguanosine-3'-phosphate
  modified_base 9: mod_base = OTHER; note = 2'-fluorocytidine-3'-phosphate
  modified_base 10: mod_base = OTHER; note = 2'-fluoroadenosine-3'-phosphate
  modified_base 11: mod_base = OTHER; note = 2'-fluorocytidine-3'-phosphate
  modified_base 12: mod_base = OTHER; note = 2'-O-methyladenosine-3'-phosphate
  modified_base 13: mod_base = OTHER; note = 2'-O-methylguanosine-3'-phosphate
  modified_base 14: mod_base = OTHER; note = 2'-O-methyluridine-3'-phosphate
  modified_base 15: mod_base = OTHER; note = 2'-O-methylguanosine-3'-phosphate
  modified_base 16: mod_base = OTHER; note = 2'-O-methyladenosine-3'-phosphate
  modified_base 17: mod_base = OTHER; note = 2'-O-methylguanosine-3'-phosphate
  modified_base 18: mod_base = OTHER; note = 2'-O-methylcytidine-3'-phosphate
  modified_base 19: mod_base = OTHER; note = 2'-O-methyluridine-3'-phosphate
  modified_base 20: mod_base = OTHER; note = 2'-O-methyladenosine-3'-phosphate
  modified_base 21: mod_base = OTHER; note = 2'-O-methyluridine-3'-phosphate N-[tris(GalNAc-alkyl)-amidodecanoyl)]-4-hydroxyprolinol (Hyp-(GalNAc-alkyl)3)
atggcatgcacagtgagctat

SEQ ID NO: 3380 - RNA, 21 nt, synthetic construct
  source 1..21: mol_type = other RNA
  modified_base 1: mod_base = OTHER; note = 2'-O-methyluridine-3'-phosphorothioate
  modified_base 2: mod_base = OTHER; note = 2'-O-methylguanosine-3'-phosphorothioate
  modified_base 3: mod_base = OTHER; note = 2'-O-methyladenosine-3'-phosphate
  modified_base 4: mod_base = OTHER; note = 2'-O-methylguanosine-3'-phosphate
  modified_base 5: mod_base = OTHER; note = 2'-O-methyladenosine-3'-phosphate
  modified_base 6: mod_base = OTHER; note = 2'-O-methyladenosine-3'-phosphate
  modified_base 7: mod_base = OTHER; note = 2'-fluoroguanosine-3'-phosphate
  modified_base 8: mod_base = OTHER; note = 2'-O-methyladenosine-3'-phosphate
  modified_base 9: mod_base = OTHER; note = 2'-fluorouridine-3'-phosphate
  modified_base 10: mod_base = OTHER; note = 2'-fluorouridine-3'-phosphate
  modified_base 11: mod_base = OTHER; note = 2'-fluoroguanosine-3'-phosphate
  modified_base 12: mod_base = OTHER; note = 2'-O-methyladenosine-3'-phosphate
  modified_base 13: mod_base = OTHER; note = 2'-O-methylcytidine-3'-phosphate
  modified_base 14: mod_base = OTHER; note = 2'-O-methyladenosine-3'-phosphate
  modified_base 15: mod_base = OTHER; note = 2'-O-methylguanosine-3'-phosphate
  modified_base 16: mod_base = OTHER; note = 2'-O-methylguanosine-3'-phosphate
  modified_base 17: mod_base = OTHER; note = 2'-O-methyluridine-3'-phosphate
  modified_base 18: mod_base = OTHER; note = 2'-O-methyluridine-3'-phosphate
  modified_base 19: mod_base = OTHER; note = 2'-O-methylcytidine-3'-phosphate
  modified_base 20: mod_base = OTHER; note = 2'-O-methyladenosine-3'-phosphate
  modified_base 21: mod_base = OTHER; note = 2'-O-methyluridine-3'-phosphate N-[tris(GalNAc-alkyl)-amidodecanoyl)]-4-hydroxyprolinol (Hyp-(GalNAc-alkyl)3)
tgagaagattgacaggttcat

SEQ ID NO: 3381 - RNA, 23 nt, synthetic construct
  source 1..23: mol_type = other RNA
  modified_base 1: mod_base = OTHER; note = 2'-O-methyladenosine-3'-phosphorothioate
  modified_base 2: mod_base = OTHER; note = 2'-fluoroadenosine-3'-phosphorothioate
  modified_base 3: mod_base = OTHER; note = 2'-O-methylguanosine-3'-phosphate
  modified_base 4: mod_base = OTHER; note = 2'-O-methylguanosine-3'-phosphate
  modified_base 5: mod_base = OTHER; note = 2'-O-methyladenosine-3'-phosphate
  modified_base 6: mod_base = OTHER; note = 2'-fluorouridine-3'-phosphate
  modified_base 7: mod_base = OTHER; note = 2'-O-methylguanosine-3'-phosphate
  modified_base 8: mod_base = OTHER; note = 2'-fluoroguanosine-3'-phosphate
  modified_base 9: mod_base = OTHER; note = 2'-fluorouridine-3'-phosphate
  modified_base 10: mod_base = OTHER; note = 2'-O-methylguanosine-3'-phosphate
  modified_base 11: mod_base = OTHER; note = 2'-O-methylguanosine-3'-phosphate
  modified_base 12: mod_base = OTHER; note = 2'-O-methylcytidine-3'-phosphate
  modified_base 13: mod_base = OTHER; note = 2'-O-methylcytidine-3'-phosphate
  modified_base 14: mod_base = OTHER; note = 2'-fluorocytidine-3'-phosphate
  modified_base 15: mod_base = OTHER; note = 2'-O-methyluridine-3'-phosphate
  modified_base 16: mod_base = OTHER; note = 2'-fluorocytidine-3'-phosphate
  modified_base 17: mod_base = OTHER; note = 2'-O-methyladenosine-3'-phosphate
  modified_base 18: mod_base = OTHER; note = 2'-O-methylguanosine-3'-phosphate
  modified_base 19: mod_base = OTHER; note = 2'-O-methylguanosine-3'-phosphate
  modified_base 20: mod_base = OTHER; note = 2'-O-methylcytidine-3'-phosphate
  modified_base 21: mod_base = OTHER; note = 2'-O-methyluridine-3'-phosphorothioate
  modified_base 22: mod_base = OTHER; note = 2'-O-methylcytidine-3'-phosphorothioate
  modified_base 23: mod_base = OTHER; note = 2'-O-methyladenosine-3'-phosphate
aaggatggtggccctcaggctca

SEQ ID NO: 3382 - RNA, 23 nt, synthetic construct
  source 1..23: mol_type = other RNA
  modified_base 1: mod_base = OTHER; note = 2'-O-methyladenosine-3'-phosphorothioate
  modified_base 2: mod_base = OTHER; note = 2'-fluoroadenosine-3'-phosphorothioate
  modified_base 3: mod_base = OTHER; note = 2'-O-methylguanosine-3'-phosphate
  modified_base 4: mod_base = OTHER; note = 2'-O-methyladenosine-3'-phosphate
  modified_base 5: mod_base = OTHER; note = 2'-O-methylguanosine-3'-phosphate
  modified_base 6: mod_base = OTHER; note = 2'-fluoroguanosine-3'-phosphate
  modified_base 7: mod_base = OTHER; note = 2'-O-methyladenosine-3'-phosphate
  modified_base 8: mod_base = OTHER; note = 2'-fluorouridine-3'-phosphate
  modified_base 9: mod_base = OTHER; note = 2'-fluoroguanosine-3'-phosphate
  modified_base 10: mod_base = OTHER; note = 2'-O-methylguanosine-3'-phosphate
  modified_base 11: mod_base = OTHER; note = 2'-O-methyluridine-3'-phosphate
  modified_base 12: mod_base = OTHER; note = 2'-O-methylguanosine-3'-phosphate
  modified_base 13: mod_base = OTHER; note = 2'-O-methylguanosine-3'-phosphate
  modified_base 14: mod_base = OTHER; note = 2'-fluorocytidine-3'-phosphate
  modified_base 15: mod_base = OTHER; note = 2'-O-methylcytidine-3'-phosphate
  modified_base 16: mod_base = OTHER; note = 2'-fluorocytidine-3'-phosphate
  modified_base 17: mod_base = OTHER; note = 2'-O-methyluridine-3'-phosphate
  modified_base 18: mod_base = OTHER; note = 2'-O-methylcytidine-3'-phosphate
  modified_base 19: mod_base = OTHER; note = 2'-O-methyladenosine-3'-phosphate
  modified_base 20: mod_base = OTHER; note = 2'-O-methylguanosine-3'-phosphate
  modified_base 21: mod_base = OTHER; note = 2'-O-methylguanosine-3'-phosphorothioate
  modified_base 22: mod_base = OTHER; note = 2'-O-methylcytidine-3'-phosphorothioate
  modified_base 23: mod_base = OTHER; note = 2'-O-methyluridine-3'-phosphate
aagaggatggtggccctcaggct

SEQ ID NO: 3383 - RNA, 23 nt, synthetic construct
  source 1..23: mol_type = other RNA
  modified_base 1: mod_base = OTHER; note = 2'-O-methyladenosine-3'-phosphorothioate
  modified_base 2: mod_base = OTHER; note = 2'-fluoroadenosine-3'-phosphorothioate
  modified_base 3: mod_base = OTHER; note = 2'-O-methylguanosine-3'-phosphate
  modified_base 4: mod_base = OTHER; note = 2'-O-methylguanosine-3'-phosphate
  modified_base 5: mod_base = OTHER; note = 2'-O-methylcytidine-3'-phosphate
  modified_base 6: mod_base = OTHER; note = 2'-fluoroadenosine-3'-phosphate
  modified_base 7: mod_base = OTHER; note = 2'-O-methylguanosine-3'-phosphate
  modified_base 8: mod_base = OTHER; note = 2'-fluoroadenosine-3'-phosphate
  modified_base 9: mod_base = OTHER; note = 2'-fluoroguanosine-3'-phosphate
  modified_base 10: mod_base = OTHER; note = 2'-O-methylguanosine-3'-phosphate
  modified_base 11: mod_base = OTHER; note = 2'-O-methyladenosine-3'-phosphate
  modified_base 12: mod_base = OTHER; note = 2'-O-methyluridine-3'-phosphate
  modified_base 13: mod_base = OTHER; note = 2'-O-methylguanosine-3'-phosphate
  modified_base 14: mod_base = OTHER; note = 2'-fluoroguanosine-3'-phosphate
  modified_base 15: mod_base = OTHER; note = 2'-O-methyluridine-3'-phosphate
  modified_base 16: mod_base = OTHER; note = 2'-fluoroguanosine-3'-phosphate
  modified_base 17: mod_base = OTHER; note = 2'-O-methylguanosine-3'-phosphate
  modified_base 18: mod_base = OTHER; note = 2'-O-methylcytidine-3'-phosphate
  modified_base 19: mod_base = OTHER; note = 2'-O-methylcytidine-3'-phosphate
  modified_base 20: mod_base = OTHER; note = 2'-O-methylcytidine-3'-phosphate
  modified_base 21: mod_base = OTHER; note = 2'-O-methyluridine-3'-phosphorothioate
  modified_base 22: mod_base = OTHER; note = 2'-O-methylcytidine-3'-phosphorothioate
  modified_base 23: mod_base = OTHER; note = 2'-O-methyladenosine-3'-phosphate
aaggcagaggatggtggccctca

SEQ ID NO: 3384 - RNA, 23 nt, synthetic construct
  source 1..23: mol_type = other RNA
  modified_base 1: mod_base = OTHER; note = 2'-O-methyladenosine-3'-phosphorothioate
  modified_base 2: mod_base = OTHER; note = 2'-fluoroguanosine-3'-phosphorothioate
  modified_base 3: mod_base = OTHER; note = 2'-O-methyluridine-3'-phosphate
  modified_base 4: mod_base = OTHER; note = 2'-O-methyladenosine-3'-phosphate
  modified_base 5: mod_base = OTHER; note = 2'-O-methylcytidine-3'-phosphate
  modified_base 6: mod_base = OTHER; note = 2'-fluorouridine-3'-phosphate
  modified_base 7: mod_base = OTHER; note = 2'-O-methylcytidine-3'-phosphate
  modified_base 8: mod_base = OTHER; note = 2'-fluorouridine-3'-phosphate
  modified_base 9: mod_base = OTHER; note = 2'-fluorocytidine-3'-phosphate
  modified_base 10: mod_base = OTHER; note = 2'-O-methyladenosine-3'-phosphate
  modified_base 11: mod_base = OTHER; note = 2'-O-methyluridine-3'-phosphate
  modified_base 12: mod_base = OTHER; note = 2'-O-methyluridine-3'-phosphate
  modified_base 13: mod_base = OTHER; note = 2'-O-methylguanosine-3'-phosphate
  modified_base 14: mod_base = OTHER; note = 2'-fluorouridine-3'-phosphate
  modified_base 15: mod_base = OTHER; note = 2'-O-methylguanosine-3'-phosphate
  modified_base 16: mod_base = OTHER; note = 2'-fluoroguanosine-3'-phosphate
  modified_base 17: mod_base = OTHER; note = 2'-O-methyladenosine-3'-phosphate
  modified_base 18: mod_base = OTHER; note = 2'-O-methyluridine-3'-phosphate
  modified_base 19: mod_base = OTHER; note = 2'-O-methylguanosine-3'-phosphate
  modified_base 20: mod_base = OTHER; note = 2'-O-methyladenosine-3'-phosphate
  modified_base 21: mod_base = OTHER; note = 2'-O-methylcytidine-3'-phosphorothioate
  modified_base 22: mod_base = OTHER; note = 2'-O-methylguanosine-3'-phosphorothioate
  modified_base 23: mod_base = OTHER; note = 2'-O-methyladenosine-3'-phosphate
agtactctcattgtggatgacga

SEQ ID NO: 3385 - RNA, 23 nt, synthetic construct
  source 1..23: mol_type = other RNA
  modified_base 1: mod_base = OTHER; note = 2'-O-methyladenosine-3'-phosphorothioate
  modified_base 2: mod_base = OTHER; note = 2'-fluoroguanosine-3'-phosphorothioate
  modified_base 3: mod_base = OTHER; note = 2'-O-methyluridine-3'-phosphate
  modified_base 4: mod_base = OTHER; note = 2'-O-methylguanosine-3'-phosphate
  modified_base 5: mod_base = OTHER; note = 2'-O-methyluridine-3'-phosphate
  modified_base 6: mod_base = OTHER; note = 2'-fluoroadenosine-3'-phosphate
  modified_base 7: mod_base = OTHER; note = 2'-O-methyluridine-3'-phosphate
  modified_base 8: mod_base = OTHER; note = 2'-fluoroguanosine-3'-phosphate
  modified_base 9: mod_base = OTHER; note = 2'-fluorouridine-3'-phosphate
  modified_base 10: mod_base = OTHER; note = 2'-O-methyladenosine-3'-phosphate
  modified_base 11: mod_base = OTHER; note = 2'-O-methylcytidine-3'-phosphate
  modified_base 12: mod_base = OTHER; note = 2'-O-methyladenosine-3'-phosphate
  modified_base 13: mod_base = OTHER; note = 2'-O-methylcytidine-3'-phosphate
  modified_base 14: mod_base = OTHER; note = 2'-fluorocytidine-3'-phosphate
  modified_base 15: mod_base = OTHER; note = 2'-O-methylcytidine-3'-phosphate
  modified_base 16: mod_base = OTHER; note = 2'-fluoroguanosine-3'-phosphate
  modified_base 17: mod_base = OTHER; note = 2'-O-methylguanosine-3'-phosphate
  modified_base 18: mod_base = OTHER; note = 2'-O-methyluridine-3'-phosphate
  modified_base 19: mod_base = OTHER; note = 2'-O-methylcytidine-3'-phosphate
  modified_base 20: mod_base = OTHER; note = 2'-O-methyladenosine-3'-phosphate
  modified_base 21: mod_base = OTHER; note = 2'-O-methylcytidine-3'-phosphorothioate
  modified_base 22: mod_base = OTHER; note = 2'-O-methylcytidine-3'-phosphorothioate
  modified_base 23: mod_base = OTHER; note = 2'-O-methyluridine-3'-phosphate
agtgtatgtacacccggtcacct

SEQ ID NO: 3386 - RNA, 23 nt, synthetic construct
  source 1..23: mol_type = other RNA
  modified_base 1: mod_base = OTHER; note = 2'-O-methyladenosine-3'-phosphorothioate
  modified_base 2: mod_base = OTHER; note = 2'-fluorouridine -3'-phosphorothioate
  modified_base 3: mod_base = OTHER; note = 2'-O-methylguanosine-3'-phosphate
  modified_base 4: mod_base = OTHER; note = 2'-O-methyluridine-3'-phosphate
  modified_base 5: mod_base = OTHER; note = 2'-O-methylguanosine-3'-phosphate
  modified_base 6: mod_base = OTHER; note = 2'-fluoroguanosine-3'-phosphate
  modified_base 7: mod_base = OTHER; note = 2'-O-methyladenosine-3'-phosphate
  modified_base 8: mod_base = OTHER; note = 2'-fluorouridine-3'-phosphate
  modified_base 9: mod_base = OTHER; note = 2'-fluoroguanosine-3'-phosphate
  modified_base 10: mod_base = OTHER; note = 2'-O-methyladenosine-3'-phosphate
  modified_base 11: mod_base = OTHER; note = 2'-O-methylcytidine-3'-phosphate
  modified_base 12: mod_base = OTHER; note = 2'-O-methylguanosine-3'-phosphate
  modified_base 13: mod_base = OTHER; note = 2'-O-methyladenosine-3'-phosphate
  modified_base 14: mod_base = OTHER; note = 2'-fluoroguanosine-3'-phosphate
  modified_base 15: mod_base = OTHER; note = 2'-O-methylguanosine-3'-phosphate
  modified_base 16: mod_base = OTHER; note = 2'-fluorouridine-3'-phosphate
  modified_base 17: mod_base = OTHER; note = 2'-O-methylguanosine-3'-phosphate
  modified_base 18: mod_base = OTHER; note = 2'-O-methylguanosine-3'-phosphate
  modified_base 19: mod_base = OTHER; note = 2'-O-methyladenosine-3'-phosphate
  modified_base 20: mod_base = OTHER; note = 2'-O-methyladenosine-3'-phosphate
  modified_base 21: mod_base = OTHER; note = 2'-O-methylguanosine-3'-phosphorothioate
  modified_base 22: mod_base = OTHER; note = 2'-O-methylguanosine-3'-phosphorothioate
  modified_base 23: mod_base = OTHER; note = 2'-O-methylguanosine-3'-phosphate
atgtggatgacgaggtggaaggg

SEQ ID NO: 3387 - RNA, 23 nt, synthetic construct
  source 1..23: mol_type = other RNA
  modified_base 1: mod_base = OTHER; note = 2'-O-methyladenosine-3'-phosphorothioate
  modified_base 2: mod_base = OTHER; note = 2'-fluorouridine -3'-phosphorothioate
  modified_base 3: mod_base = OTHER; note = 2'-O-methyluridine-3'-phosphate
  modified_base 4: mod_base = OTHER; note = 2'-O-methylguanosine-3'-phosphate
  modified_base 5: mod_base = OTHER; note = 2'-O-methyluridine-3'-phosphate
  modified_base 6: mod_base = OTHER; note = 2'-fluoroguanosine-3'-phosphate
  modified_base 7: mod_base = OTHER; note = 2'-O-methylguanosine-3'-phosphate
  modified_base 8: mod_base = OTHER; note = 2'-fluoroadenosine-3'-phosphate
  modified_base 9: mod_base = OTHER; note = 2'-fluorouridine-3'-phosphate
  modified_base 10: mod_base = OTHER; note = 2'-O-methylguanosine-3'-phosphate
  modified_base 11: mod_base = OTHER; note = 2'-O-methyladenosine-3'-phosphate
  modified_base 12: mod_base = OTHER; note = 2'-O-methylcytidine-3'-phosphate
  modified_base 13: mod_base = OTHER; note = 2'-O-methylguanosine-3'-phosphate
  modified_base 14: mod_base = OTHER; note = 2'-fluoroadenosine-3'-phosphate
  modified_base 15: mod_base = OTHER; note = 2'-O-methylguanosine-3'-phosphate
  modified_base 16: mod_base = OTHER; note = 2'-fluoroguanosine-3'-phosphate
  modified_base 17: mod_base = OTHER; note = 2'-O-methyluridine-3'-phosphate
  modified_base 18: mod_base = OTHER; note = 2'-O-methylguanosine-3'-phosphate
  modified_base 19: mod_base = OTHER; note = 2'-O-methylguanosine-3'-phosphate
  modified_base 20: mod_base = OTHER; note = 2'-O-methyladenosine-3'-phosphate
  modified_base 21: mod_base = OTHER; note = 2'-O-methyladenosine-3'-phosphorothioate
  modified_base 22: mod_base = OTHER; note = 2'-O-methylguanosine-3'-phosphorothioate
  modified_base 23: mod_base = OTHER; note = 2'-O-methylguanosine-3'-phosphate
attgtggatgacgaggtggaagg

SEQ ID NO: 3388 - RNA, 23 nt, synthetic construct
  source 1..23: mol_type = other RNA
  modified_base 1: mod_base = OTHER; note = 2'-O-methyladenosine-3'-phosphorothioate
  modified_base 2: mod_base = OTHER; note = 2'-fluoroadenosine-3'-phosphorothioate
  modified_base 3: mod_base = OTHER; note = 2'-O-methyluridine-3'-phosphate
  modified_base 4: mod_base = OTHER; note = 2'-O-methyluridine-3'-phosphate
  modified_base 5: mod_base = OTHER; note = 2'-O-methylguanosine-3'-phosphate
  modified_base 6: mod_base = OTHER; note = 2'-fluorouridine-3'-phosphate
  modified_base 7: mod_base = OTHER; note = 2'-O-methylguanosine-3'-phosphate
  modified_base 8: mod_base = OTHER; note = 2'-fluoroguanosine-3'-phosphate
  modified_base 9: mod_base = OTHER; note = 2'-fluoroadenosine-3'-phosphate
  modified_base 10: mod_base = OTHER; note = 2'-O-methyluridine-3'-phosphate
  modified_base 11: mod_base = OTHER; note = 2'-O-methylguanosine-3'-phosphate
  modified_base 12: mod_base = OTHER; note = 2'-O-methyladenosine-3'-phosphate
  modified_base 13: mod_base = OTHER; note = 2'-O-methylcytidine-3'-phosphate
  modified_base 14: mod_base = OTHER; note = 2'-fluoroguanosine-3'-phosphate
  modified_base 15: mod_base = OTHER; note = 2'-O-methyladenosine-3'-phosphate
  modified_base 16: mod_base = OTHER; note = 2'-fluoroguanosine-3'-phosphate
  modified_base 17: mod_base = OTHER; note = 2'-O-methylguanosine-3'-phosphate
  modified_base 18: mod_base = OTHER; note = 2'-O-methyluridine-3'-phosphate
  modified_base 19: mod_base = OTHER; note = 2'-O-methylguanosine-3'-phosphate
  modified_base 20: mod_base = OTHER; note = 2'-O-methylguanosine-3'-phosphate
  modified_base 21: mod_base = OTHER; note = 2'-O-methyladenosine-3'-phosphorothioate
  modified_base 22: mod_base = OTHER; note = 2'-O-methyladenosine-3'-phosphorothioate
  modified_base 23: mod_base = OTHER; note = 2'-O-methylguanosine-3'-phosphate
aattgtggatgacgaggtggaag

SEQ ID NO: 3389 - RNA, 23 nt, synthetic construct
  source 1..23: mol_type = other RNA
  modified_base 1: mod_base = OTHER; note = 2'-O-methyladenosine-3'-phosphorothioate
  modified_base 2: mod_base = OTHER; note = 2'-fluorocytidine-3'-phosphorothioate
  modified_base 3: mod_base = OTHER; note = 2'-O-methyladenosine-3'-phosphate
  modified_base 4: mod_base = OTHER; note = 2'-O-methyluridine-3'-phosphate
  modified_base 5: mod_base = OTHER; note = 2'-O-methyluridine-3'-phosphate
  modified_base 6: mod_base = OTHER; note = 2'-fluoroguanosine-3'-phosphate
  modified_base 7: mod_base = OTHER; note = 2'-O-methyluridine-3'-phosphate
  modified_base 8: mod_base = OTHER; note = 2'-fluoroguanosine-3'-phosphate
  modified_base 9: mod_base = OTHER; note = 2'-fluoroguanosine-3'-phosphate
  modified_base 10: mod_base = OTHER; note = 2'-O-methyladenosine-3'-phosphate
  modified_base 11: mod_base = OTHER; note = 2'-O-methyluridine-3'-phosphate
  modified_base 12: mod_base = OTHER; note = 2'-O-methylguanosine-3'-phosphate
  modified_base 13: mod_base = OTHER; note = 2'-O-methyladenosine-3'-phosphate
  modified_base 14: mod_base = OTHER; note = 2'-fluorocytidine-3'-phosphate
  modified_base 15: mod_base = OTHER; note = 2'-O-methylguanosine-3'-phosphate
  modified_base 16: mod_base = OTHER; note = 2'-fluoroadenosine-3'-phosphate
  modified_base 17: mod_base = OTHER; note = 2'-O-methylguanosine-3'-phosphate
  modified_base 18: mod_base = OTHER; note = 2'-O-methylguanosine-3'-phosphate
  modified_base 19: mod_base = OTHER; note = 2'-O-methyluridine-3'-phosphate
  modified_base 20: mod_base = OTHER; note = 2'-O-methylguanosine-3'-phosphate
  modified_base 21: mod_base = OTHER; note = 2'-O-methylguanosine-3'-phosphorothioate
  modified_base 22: mod_base = OTHER; note = 2'-O-methyladenosine-3'-phosphorothioate
  modified_base 23: mod_base = OTHER; note = 2'-O-methyladenosine-3'-phosphate
acattgtggatgacgaggtggaa

SEQ ID NO: 3390 - RNA, 23 nt, synthetic construct
  source 1..23: mol_type = other RNA
  modified_base 1: mod_base = OTHER; note = 2'-O-methyladenosine-3'-phosphorothioate
  modified_base 2: mod_base = OTHER; note = 2'-fluorouridine -3'-phosphorothioate
  modified_base 3: mod_base = OTHER; note = 2'-O-methylcytidine-3'-phosphate
  modified_base 4: mod_base = OTHER; note = 2'-O-methyladenosine-3'-phosphate
  modified_base 5: mod_base = OTHER; note = 2'-O-methyluridine-3'-phosphate
  modified_base 6: mod_base = OTHER; note = 2'-fluorouridine-3'-phosphate
  modified_base 7: mod_base = OTHER; note = 2'-O-methylguanosine-3'-phosphate
  modified_base 8: mod_base = OTHER; note = 2'-fluorouridine-3'-phosphate
  modified_base 9: mod_base = OTHER; note = 2'-fluoroguanosine-3'-phosphate
  modified_base 10: mod_base = OTHER; note = 2'-O-methylguanosine-3'-phosphate
  modified_base 11: mod_base = OTHER; note = 2'-O-methyladenosine-3'-phosphate
  modified_base 12: mod_base = OTHER; note = 2'-O-methyluridine-3'-phosphate
  modified_base 13: mod_base = OTHER; note = 2'-O-methylguanosine-3'-phosphate
  modified_base 14: mod_base = OTHER; note = 2'-fluoroadenosine-3'-phosphate
  modified_base 15: mod_base = OTHER; note = 2'-O-methylcytidine-3'-phosphate
  modified_base 16: mod_base = OTHER; note = 2'-fluoroguanosine-3'-phosphate
  modified_base 17: mod_base = OTHER; note = 2'-O-methyladenosine-3'-phosphate
  modified_base 18: mod_base = OTHER; note = 2'-O-methylguanosine-3'-phosphate
  modified_base 19: mod_base = OTHER; note = 2'-O-methylguanosine-3'-phosphate
  modified_base 20: mod_base = OTHER; note = 2'-O-methyluridine-3'-phosphate
  modified_base 21: mod_base = OTHER; note = 2'-O-methylguanosine-3'-phosphorothioate
  modified_base 22: mod_base = OTHER; note = 2'-O-methylguanosine-3'-phosphorothioate
  modified_base 23: mod_base = OTHER; note = 2'-O-methyladenosine-3'-phosphate
atcattgtggatgacgaggtgga

SEQ ID NO: 3391 - RNA, 23 nt, synthetic construct
  source 1..23: mol_type = other RNA
  modified_base 1: mod_base = OTHER; note = 2'-O-methyladenosine-3'-phosphorothioate
  modified_base 2: mod_base = OTHER; note = 2'-fluorouridine -3'-phosphorothioate
  modified_base 3: mod_base = OTHER; note = 2'-O-methylcytidine-3'-phosphate
  modified_base 4: mod_base = OTHER; note = 2'-O-methyluridine-3'-phosphate
  modified_base 5: mod_base = OTHER; note = 2'-O-methylcytidine-3'-phosphate
  modified_base 6: mod_base = OTHER; note = 2'-fluoroadenosine-3'-phosphate
  modified_base 7: mod_base = OTHER; note = 2'-O-methyluridine-3'-phosphate
  modified_base 8: mod_base = OTHER; note = 2'-fluorouridine-3'-phosphate
  modified_base 9: mod_base = OTHER; note = 2'-fluoroguanosine-3'-phosphate
  modified_base 10: mod_base = OTHER; note = 2'-O-methyluridine-3'-phosphate
  modified_base 11: mod_base = OTHER; note = 2'-O-methylguanosine-3'-phosphate
  modified_base 12: mod_base = OTHER; note = 2'-O-methylguanosine-3'-phosphate
  modified_base 13: mod_base = OTHER; note = 2'-O-methyladenosine-3'-phosphate
  modified_base 14: mod_base = OTHER; note = 2'-fluorouridine-3'-phosphate
  modified_base 15: mod_base = OTHER; note = 2'-O-methylguanosine-3'-phosphate
  modified_base 16: mod_base = OTHER; note = 2'-fluoroadenosine-3'-phosphate
  modified_base 17: mod_base = OTHER; note = 2'-O-methylcytidine-3'-phosphate
  modified_base 18: mod_base = OTHER; note = 2'-O-methylguanosine-3'-phosphate
  modified_base 19: mod_base = OTHER; note = 2'-O-methyladenosine-3'-phosphate
  modified_base 20: mod_base = OTHER; note = 2'-O-methylguanosine-3'-phosphate
  modified_base 21: mod_base = OTHER; note = 2'-O-methylguanosine-3'-phosphorothioate
  modified_base 22: mod_base = OTHER; note = 2'-O-methyluridine-3'-phosphorothioate
  modified_base 23: mod_base = OTHER; note = 2'-O-methylguanosine-3'-phosphate
atctcattgtggatgacgaggtg

SEQ ID NO: 3392 - RNA, 23 nt, synthetic construct
  source 1..23: mol_type = other RNA
  modified_base 1: mod_base = OTHER; note = 2'-O-methyladenosine-3'-phosphorothioate
  modified_base 2: mod_base = OTHER; note = 2'-fluorocytidine-3'-phosphorothioate
  modified_base 3: mod_base = OTHER; note = 2'-O-methyluridine-3'-phosphate
  modified_base 4: mod_base = OTHER; note = 2'-O-methylcytidine-3'-phosphate
  modified_base 5: mod_base = OTHER; note = 2'-O-methyluridine-3'-phosphate
  modified_base 6: mod_base = OTHER; note = 2'-fluorocytidine-3'-phosphate
  modified_base 7: mod_base = OTHER; note = 2'-O-methyladenosine-3'-phosphate
  modified_base 8: mod_base = OTHER; note = 2'-fluorouridine-3'-phosphate
  modified_base 9: mod_base = OTHER; note = 2'-fluorouridine-3'-phosphate
  modified_base 10: mod_base = OTHER; note = 2'-O-methylguanosine-3'-phosphate
  modified_base 11: mod_base = OTHER; note = 2'-O-methyluridine-3'-phosphate
  modified_base 12: mod_base = OTHER; note = 2'-O-methylguanosine-3'-phosphate
  modified_base 13: mod_base = OTHER; note = 2'-O-methylguanosine-3'-phosphate
  modified_base 14: mod_base = OTHER; note = 2'-fluoroadenosine-3'-phosphate
  modified_base 15: mod_base = OTHER; note = 2'-O-methyluridine-3'-phosphate
  modified_base 16: mod_base = OTHER; note = 2'-fluoroguanosine-3'-phosphate
  modified_base 17: mod_base = OTHER; note = 2'-O-methyladenosine-3'-phosphate
  modified_base 18: mod_base = OTHER; note = 2'-O-methylcytidine-3'-phosphate
  modified_base 19: mod_base = OTHER; note = 2'-O-methylguanosine-3'-phosphate
  modified_base 20: mod_base = OTHER; note = 2'-O-methyladenosine-3'-phosphate
  modified_base 21: mod_base = OTHER; note = 2'-O-methylguanosine-3'-phosphorothioate
  modified_base 22: mod_base = OTHER; note = 2'-O-methylguanosine-3'-phosphorothioate
  modified_base 23: mod_base = OTHER; note = 2'-O-methyluridine-3'-phosphate
actctcattgtggatgacgaggt

SEQ ID NO: 3393 - RNA, 23 nt, synthetic construct
  source 1..23: mol_type = other RNA
  modified_base 1: mod_base = OTHER; note = 2'-O-methyladenosine-3'-phosphorothioate
  modified_base 2: mod_base = OTHER; note = 2'-fluoroadenosine-3'-phosphorothioate
  modified_base 3: mod_base = OTHER; note = 2'-O-methylcytidine-3'-phosphate
  modified_base 4: mod_base = OTHER; note = 2'-O-methyluridine-3'-phosphate
  modified_base 5: mod_base = OTHER; note = 2'-O-methylcytidine-3'-phosphate
  modified_base 6: mod_base = OTHER; note = 2'-fluorouridine-3'-phosphate
  modified_base 7: mod_base = OTHER; note = 2'-O-methylcytidine-3'-phosphate
  modified_base 8: mod_base = OTHER; note = 2'-fluoroadenosine-3'-phosphate
  modified_base 9: mod_base = OTHER; note = 2'-fluorouridine-3'-phosphate
  modified_base 10: mod_base = OTHER; note = 2'-O-methyluridine-3'-phosphate
  modified_base 11: mod_base = OTHER; note = 2'-O-methylguanosine-3'-phosphate
  modified_base 12: mod_base = OTHER; note = 2'-O-methyluridine-3'-phosphate
  modified_base 13: mod_base = OTHER; note = 2'-O-methylguanosine-3'-phosphate
  modified_base 14: mod_base = OTHER; note = 2'-fluoroguanosine-3'-phosphate
  modified_base 15: mod_base = OTHER; note = 2'-O-methyladenosine-3'-phosphate
  modified_base 16: mod_base = OTHER; note = 2'-fluorouridine-3'-phosphate
  modified_base 17: mod_base = OTHER; note = 2'-O-methylguanosine-3'-phosphate
  modified_base 18: mod_base = OTHER; note = 2'-O-methyladenosine-3'-phosphate
  modified_base 19: mod_base = OTHER; note = 2'-O-methylcytidine-3'-phosphate
  modified_base 20: mod_base = OTHER; note = 2'-O-methylguanosine-3'-phosphate
  modified_base 21: mod_base = OTHER; note = 2'-O-methyladenosine-3'-phosphorothioate
  modified_base 22: mod_base = OTHER; note = 2'-O-methylguanosine-3'-phosphorothioate
  modified_base 23: mod_base = OTHER; note = 2'-O-methylguanosine-3'-phosphate
aactctcattgtggatgacgagg

SEQ ID NO: 3394 - RNA, 23 nt, synthetic construct
  source 1..23: mol_type = other RNA
  modified_base 1: mod_base = OTHER; note = 2'-O-methyladenosine-3'-phosphorothioate
  modified_base 2: mod_base = OTHER; note = 2'-fluorouridine -3'-phosphorothioate
  modified_base 3: mod_base = OTHER; note = 2'-O-methyladenosine-3'-phosphate
  modified_base 4: mod_base = OTHER; note = 2'-O-methylcytidine-3'-phosphate
  modified_base 5: mod_base = OTHER; note = 2'-O-methyluridine-3'-phosphate
  modified_base 6: mod_base = OTHER; note = 2'-fluorocytidine-3'-phosphate
  modified_base 7: mod_base = OTHER; note = 2'-O-methyluridine-3'-phosphate
  modified_base 8: mod_base = OTHER; note = 2'-fluorocytidine-3'-phosphate
  modified_base 9: mod_base = OTHER; note = 2'-fluoroadenosine-3'-phosphate
  modified_base 10: mod_base = OTHER; note = 2'-O-methyluridine-3'-phosphate
  modified_base 11: mod_base = OTHER; note = 2'-O-methyluridine-3'-phosphate
  modified_base 12: mod_base = OTHER; note = 2'-O-methylguanosine-3'-phosphate
  modified_base 13: mod_base = OTHER; note = 2'-O-methyluridine-3'-phosphate
  modified_base 14: mod_base = OTHER; note = 2'-fluoroguanosine-3'-phosphate
  modified_base 15: mod_base = OTHER; note = 2'-O-methylguanosine-3'-phosphate
  modified_base 16: mod_base = OTHER; note = 2'-fluoroadenosine-3'-phosphate
  modified_base 17: mod_base = OTHER; note = 2'-O-methyluridine-3'-phosphate
  modified_base 18: mod_base = OTHER; note = 2'-O-methylguanosine-3'-phosphate
  modified_base 19: mod_base = OTHER; note = 2'-O-methyladenosine-3'-phosphate
  modified_base 20: mod_base = OTHER; note = 2'-O-methylcytidine-3'-phosphate
  modified_base 21: mod_base = OTHER; note = 2'-O-methylguanosine-3'-phosphorothioate
  modified_base 22: mod_base = OTHER; note = 2'-O-methyladenosine-3'-phosphorothioate
  modified_base 23: mod_base = OTHER; note = 2'-O-methylguanosine-3'-phosphate
atactctcattgtggatgacgag

SEQ ID NO: 3395 - RNA, 23 nt, synthetic construct
  source 1..23: mol_type = other RNA
  modified_base 1: mod_base = OTHER; note = 2'-O-methyladenosine-3'-phosphorothioate
  modified_base 2: mod_base = OTHER; note = 2'-fluoroguanosine-3'-phosphorothioate
  modified_base 3: mod_base = OTHER; note = 2'-O-methylguanosine-3'-phosphate
  modified_base 4: mod_base = OTHER; note = 2'-O-methyluridine-3'-phosphate
  modified_base 5: mod_base = OTHER; note = 2'-O-methyladenosine-3'-phosphate
  modified_base 6: mod_base = OTHER; note = 2'-fluorocytidine-3'-phosphate
  modified_base 7: mod_base = OTHER; note = 2'-O-methyluridine-3'-phosphate
  modified_base 8: mod_base = OTHER; note = 2'-fluorocytidine-3'-phosphate
  modified_base 9: mod_base = OTHER; note = 2'-fluorouridine-3'-phosphate
  modified_base 10: mod_base = OTHER; note = 2'-O-methylcytidine-3'-phosphate
  modified_base 11: mod_base = OTHER; note = 2'-O-methyladenosine-3'-phosphate
  modified_base 12: mod_base = OTHER; note = 2'-O-methyluridine-3'-phosphate
  modified_base 13: mod_base = OTHER; note = 2'-O-methyluridine-3'-phosphate
  modified_base 14: mod_base = OTHER; note = 2'-fluoroguanosine-3'-phosphate
  modified_base 15: mod_base = OTHER; note = 2'-O-methyluridine-3'-phosphate
  modified_base 16: mod_base = OTHER; note = 2'-fluoroguanosine-3'-phosphate
  modified_base 17: mod_base = OTHER; note = 2'-O-methylguanosine-3'-phosphate
  modified_base 18: mod_base = OTHER; note = 2'-O-methyladenosine-3'-phosphate
  modified_base 19: mod_base = OTHER; note = 2'-O-methyluridine-3'-phosphate
  modified_base 20: mod_base = OTHER; note = 2'-O-methylguanosine-3'-phosphate
  modified_base 21: mod_base = OTHER; note = 2'-O-methyladenosine-3'-phosphorothioate
  modified_base 22: mod_base = OTHER; note = 2'-O-methylcytidine-3'-phosphorothioate
  modified_base 23: mod_base = OTHER; note = 2'-O-methylguanosine-3'-phosphate
aggtactctcattgtggatgacg

SEQ ID NO: 3396 - RNA, 23 nt, synthetic construct
  source 1..23: mol_type = other RNA
  modified_base 1: mod_base = OTHER; note = 2'-O-methyladenosine-3'-phosphorothioate
  modified_base 2: mod_base = OTHER; note = 2'-fluoroadenosine-3'-phosphorothioate
  modified_base 3: mod_base = OTHER; note = 2'-O-methylguanosine-3'-phosphate
  modified_base 4: mod_base = OTHER; note = 2'-O-methylguanosine-3'-phosphate
  modified_base 5: mod_base = OTHER; note = 2'-O-methyluridine-3'-phosphate
  modified_base 6: mod_base = OTHER; note = 2'-fluoroadenosine-3'-phosphate
  modified_base 7: mod_base = OTHER; note = 2'-O-methylcytidine-3'-phosphate
  modified_base 8: mod_base = OTHER; note = 2'-fluorouridine-3'-phosphate
  modified_base 9: mod_base = OTHER; note = 2'-fluorocytidine-3'-phosphate
  modified_base 10: mod_base = OTHER; note = 2'-O-methyluridine-3'-phosphate
  modified_base 11: mod_base = OTHER; note = 2'-O-methylcytidine-3'-phosphate
  modified_base 12: mod_base = OTHER; note = 2'-O-methyladenosine-3'-phosphate
  modified_base 13: mod_base = OTHER; note = 2'-O-methyluridine-3'-phosphate
  modified_base 14: mod_base = OTHER; note = 2'-fluorouridine-3'-phosphate
  modified_base 15: mod_base = OTHER; note = 2'-O-methylguanosine-3'-phosphate
  modified_base 16: mod_base = OTHER; note = 2'-fluorouridine-3'-phosphate
  modified_base 17: mod_base = OTHER; note = 2'-O-methylguanosine-3'-phosphate
  modified_base 18: mod_base = OTHER; note = 2'-O-methylguanosine-3'-phosphate
  modified_base 19: mod_base = OTHER; note = 2'-O-methyladenosine-3'-phosphate
  modified_base 20: mod_base = OTHER; note = 2'-O-methyluridine-3'-phosphate
  modified_base 21: mod_base = OTHER; note = 2'-O-methylguanosine-3'-phosphorothioate
  modified_base 22: mod_base = OTHER; note = 2'-O-methyladenosine-3'-phosphorothioate
  modified_base 23: mod_base = OTHER; note = 2'-O-methylcytidine-3'-phosphate
aaggtactctcattgtggatgac

SEQ ID NO: 3397 - RNA, 23 nt, synthetic construct
  source 1..23: mol_type = other RNA
  modified_base 1: mod_base = OTHER; note = 2'-O-methyladenosine-3'-phosphorothioate
  modified_base 2: mod_base = OTHER; note = 2'-fluoroadenosine-3'-phosphorothioate
  modified_base 3: mod_base = OTHER; note = 2'-O-methylcytidine-3'-phosphate
  modified_base 4: mod_base = OTHER; note = 2'-O-methyladenosine-3'-phosphate
  modified_base 5: mod_base = OTHER; note = 2'-O-methylguanosine-3'-phosphate
  modified_base 6: mod_base = OTHER; note = 2'-fluoroguanosine-3'-phosphate
  modified_base 7: mod_base = OTHER; note = 2'-O-methyluridine-3'-phosphate
  modified_base 8: mod_base = OTHER; note = 2'-fluoroadenosine-3'-phosphate
  modified_base 9: mod_base = OTHER; note = 2'-fluorocytidine-3'-phosphate
  modified_base 10: mod_base = OTHER; note = 2'-O-methyluridine-3'-phosphate
  modified_base 11: mod_base = OTHER; note = 2'-O-methylcytidine-3'-phosphate
  modified_base 12: mod_base = OTHER; note = 2'-O-methyluridine-3'-phosphate
  modified_base 13: mod_base = OTHER; note = 2'-O-methylcytidine-3'-phosphate
  modified_base 14: mod_base = OTHER; note = 2'-fluoroadenosine-3'-phosphate
  modified_base 15: mod_base = OTHER; note = 2'-O-methyluridine-3'-phosphate
  modified_base 16: mod_base = OTHER; note = 2'-fluorouridine-3'-phosphate
  modified_base 17: mod_base = OTHER; note = 2'-O-methylguanosine-3'-phosphate
  modified_base 18: mod_base = OTHER; note = 2'-O-methyluridine-3'-phosphate
  modified_base 19: mod_base = OTHER; note = 2'-O-methylguanosine-3'-phosphate
  modified_base 20: mod_base = OTHER; note = 2'-O-methylguanosine-3'-phosphate
  modified_base 21: mod_base = OTHER; note = 2'-O-methyladenosine-3'-phosphorothioate
  modified_base 22: mod_base = OTHER; note = 2'-O-methyluridine-3'-phosphorothioate
  modified_base 23: mod_base = OTHER; note = 2'-O-methylguanosine-3'-phosphate
aacaggtactctcattgtggatg

SEQ ID NO: 3398 - RNA, 23 nt, synthetic construct
  source 1..23: mol_type = other RNA
  modified_base 1: mod_base = OTHER; note = 2'-O-methyladenosine-3'-phosphorothioate
  modified_base 2: mod_base = OTHER; note = 2'-fluorocytidine-3'-phosphorothioate
  modified_base 3: mod_base = OTHER; note = 2'-O-methyladenosine-3'-phosphate
  modified_base 4: mod_base = OTHER; note = 2'-O-methylcytidine-3'-phosphate
  modified_base 5: mod_base = OTHER; note = 2'-O-methyladenosine-3'-phosphate
  modified_base 6: mod_base = OTHER; note = 2'-fluoroguanosine-3'-phosphate
  modified_base 7: mod_base = OTHER; note = 2'-O-methylguanosine-3'-phosphate
  modified_base 8: mod_base = OTHER; note = 2'-fluorouridine-3'-phosphate
  modified_base 9: mod_base = OTHER; note = 2'-fluoroadenosine-3'-phosphate
  modified_base 10: mod_base = OTHER; note = 2'-O-methylcytidine-3'-phosphate
  modified_base 11: mod_base = OTHER; note = 2'-O-methyluridine-3'-phosphate
  modified_base 12: mod_base = OTHER; note = 2'-O-methylcytidine-3'-phosphate
  modified_base 13: mod_base = OTHER; note = 2'-O-methyluridine-3'-phosphate
  modified_base 14: mod_base = OTHER; note = 2'-fluorocytidine-3'-phosphate
  modified_base 15: mod_base = OTHER; note = 2'-O-methyladenosine-3'-phosphate
  modified_base 16: mod_base = OTHER; note = 2'-fluorouridine-3'-phosphate
  modified_base 17: mod_base = OTHER; note = 2'-O-methyluridine-3'-phosphate
  modified_base 18: mod_base = OTHER; note = 2'-O-methylguanosine-3'-phosphate
  modified_base 19: mod_base = OTHER; note = 2'-O-methyluridine-3'-phosphate
  modified_base 20: mod_base = OTHER; note = 2'-O-methylguanosine-3'-phosphate
  modified_base 21: mod_base = OTHER; note = 2'-O-methylguanosine-3'-phosphorothioate
  modified_base 22: mod_base = OTHER; note = 2'-O-methyladenosine-3'-phosphorothioate
  modified_base 23: mod_base = OTHER; note = 2'-O-methyluridine-3'-phosphate
acacaggtactctcattgtggat

SEQ ID NO: 3399 - RNA, 23 nt, synthetic construct
  source 1..23: mol_type = other RNA
  modified_base 1: mod_base = OTHER; note = 2'-O-methyladenosine-3'-phosphorothioate
  modified_base 2: mod_base = OTHER; note = 2'-fluorouridine -3'-phosphorothioate
  modified_base 3: mod_base = OTHER; note = 2'-O-methylcytidine-3'-phosphate
  modified_base 4: mod_base = OTHER; note = 2'-O-methyladenosine-3'-phosphate
  modified_base 5: mod_base = OTHER; note = 2'-O-methylcytidine-3'-phosphate
  modified_base 6: mod_base = OTHER; note = 2'-fluoroadenosine-3'-phosphate
  modified_base 7: mod_base = OTHER; note = 2'-O-methylguanosine-3'-phosphate
  modified_base 8: mod_base = OTHER; note = 2'-fluoroguanosine-3'-phosphate
  modified_base 9: mod_base = OTHER; note = 2'-fluorouridine-3'-phosphate
  modified_base 10: mod_base = OTHER; note = 2'-O-methyladenosine-3'-phosphate
  modified_base 11: mod_base = OTHER; note = 2'-O-methylcytidine-3'-phosphate
  modified_base 12: mod_base = OTHER; note = 2'-O-methyluridine-3'-phosphate
  modified_base 13: mod_base = OTHER; note = 2'-O-methylcytidine-3'-phosphate
  modified_base 14: mod_base = OTHER; note = 2'-fluorouridine-3'-phosphate
  modified_base 15: mod_base = OTHER; note = 2'-O-methylcytidine-3'-phosphate
  modified_base 16: mod_base = OTHER; note = 2'-fluoroadenosine-3'-phosphate
  modified_base 17: mod_base = OTHER; note = 2'-O-methyluridine-3'-phosphate
  modified_base 18: mod_base = OTHER; note = 2'-O-methyluridine-3'-phosphate
  modified_base 19: mod_base = OTHER; note = 2'-O-methylguanosine-3'-phosphate
  modified_base 20: mod_base = OTHER; note = 2'-O-methyluridine-3'-phosphate
  modified_base 21: mod_base = OTHER; note = 2'-O-methylguanosine-3'-phosphorothioate
  modified_base 22: mod_base = OTHER; note = 2'-O-methylguanosine-3'-phosphorothioate
  modified_base 23: mod_base = OTHER; note = 2'-O-methyladenosine-3'-phosphate
atcacaggtactctcattgtgga

SEQ ID NO: 3400 - RNA, 23 nt, synthetic construct
  source 1..23: mol_type = other RNA
  modified_base 1: mod_base = OTHER; note = 2'-O-methyladenosine-3'-phosphorothioate
  modified_base 2: mod_base = OTHER; note = 2'-fluoroguanosine-3'-phosphorothioate
  modified_base 3: mod_base = OTHER; note = 2'-O-methylcytidine-3'-phosphate
  modified_base 4: mod_base = OTHER; note = 2'-O-methyluridine-3'-phosphate
  modified_base 5: mod_base = OTHER; note = 2'-O-methylcytidine-3'-phosphate
  modified_base 6: mod_base = OTHER; note = 2'-fluoroadenosine-3'-phosphate
  modified_base 7: mod_base = OTHER; note = 2'-O-methylcytidine-3'-phosphate
  modified_base 8: mod_base = OTHER; note = 2'-fluoroadenosine-3'-phosphate
  modified_base 9: mod_base = OTHER; note = 2'-fluoroguanosine-3'-phosphate
  modified_base 10: mod_base = OTHER; note = 2'-O-methylguanosine-3'-phosphate
  modified_base 11: mod_base = OTHER; note = 2'-O-methyluridine-3'-phosphate
  modified_base 12: mod_base = OTHER; note = 2'-O-methyladenosine-3'-phosphate
  modified_base 13: mod_base = OTHER; note = 2'-O-methylcytidine-3'-phosphate
  modified_base 14: mod_base = OTHER; note = 2'-fluorouridine-3'-phosphate
  modified_base 15: mod_base = OTHER; note = 2'-O-methylcytidine-3'-phosphate
  modified_base 16: mod_base = OTHER; note = 2'-fluorouridine-3'-phosphate
  modified_base 17: mod_base = OTHER; note = 2'-O-methylcytidine-3'-phosphate
  modified_base 18: mod_base = OTHER; note = 2'-O-methyladenosine-3'-phosphate
  modified_base 19: mod_base = OTHER; note = 2'-O-methyluridine-3'-phosphate
  modified_base 20: mod_base = OTHER; note = 2'-O-methyluridine-3'-phosphate
  modified_base 21: mod_base = OTHER; note = 2'-O-methylguanosine-3'-phosphorothioate
  modified_base 22: mod_base = OTHER; note = 2'-O-methyluridine-3'-phosphorothioate
  modified_base 23: mod_base = OTHER; note = 2'-O-methylguanosine-3'-phosphate
agctcacaggtactctcattgtg

SEQ ID NO: 3401 - RNA, 23 nt, synthetic construct
  source 1..23: mol_type = other RNA
  modified_base 1: mod_base = OTHER; note = 2'-O-methyladenosine-3'-phosphorothioate
  modified_base 2: mod_base = OTHER; note = 2'-fluorouridine -3'-phosphorothioate
  modified_base 3: mod_base = OTHER; note = 2'-O-methylguanosine-3'-phosphate
  modified_base 4: mod_base = OTHER; note = 2'-O-methylcytidine-3'-phosphate
  modified_base 5: mod_base = OTHER; note = 2'-O-methyluridine-3'-phosphate
  modified_base 6: mod_base = OTHER; note = 2'-fluorocytidine-3'-phosphate
  modified_base 7: mod_base = OTHER; note = 2'-O-methyladenosine-3'-phosphate
  modified_base 8: mod_base = OTHER; note = 2'-fluorocytidine-3'-phosphate
  modified_base 9: mod_base = OTHER; note = 2'-fluoroadenosine-3'-phosphate
  modified_base 10: mod_base = OTHER; note = 2'-O-methylguanosine-3'-phosphate
  modified_base 11: mod_base = OTHER; note = 2'-O-methylguanosine-3'-phosphate
  modified_base 12: mod_base = OTHER; note = 2'-O-methyluridine-3'-phosphate
  modified_base 13: mod_base = OTHER; note = 2'-O-methyladenosine-3'-phosphate
  modified_base 14: mod_base = OTHER; note = 2'-fluorocytidine-3'-phosphate
  modified_base 15: mod_base = OTHER; note = 2'-O-methyluridine-3'-phosphate
  modified_base 16: mod_base = OTHER; note = 2'-fluorocytidine-3'-phosphate
  modified_base 17: mod_base = OTHER; note = 2'-O-methyluridine-3'-phosphate
  modified_base 18: mod_base = OTHER; note = 2'-O-methylcytidine-3'-phosphate
  modified_base 19: mod_base = OTHER; note = 2'-O-methyladenosine-3'-phosphate
  modified_base 20: mod_base = OTHER; note = 2'-O-methyluridine-3'-phosphate
  modified_base 21: mod_base = OTHER; note = 2'-O-methyluridine-3'-phosphorothioate
  modified_base 22: mod_base = OTHER; note = 2'-O-methylguanosine-3'-phosphorothioate
  modified_base 23: mod_base = OTHER; note = 2'-O-methyluridine-3'-phosphate
atgctcacaggtactctcattgt

SEQ ID NO: 3402 - RNA, 23 nt, synthetic construct
  source 1..23: mol_type = other RNA
  modified_base 1: mod_base = OTHER; note = 2'-O-methyladenosine-3'-phosphorothioate
  modified_base 2: mod_base = OTHER; note = 2'-fluorocytidine-3'-phosphorothioate
  modified_base 3: mod_base = OTHER; note = 2'-O-methyluridine-3'-phosphate
  modified_base 4: mod_base = OTHER; note = 2'-O-methylguanosine-3'-phosphate
  modified_base 5: mod_base = OTHER; note = 2'-O-methylcytidine-3'-phosphate
  modified_base 6: mod_base = OTHER; note = 2'-fluorouridine-3'-phosphate
  modified_base 7: mod_base = OTHER; note = 2'-O-methylcytidine-3'-phosphate
  modified_base 8: mod_base = OTHER; note = 2'-fluoroadenosine-3'-phosphate
  modified_base 9: mod_base = OTHER; note = 2'-fluorocytidine-3'-phosphate
  modified_base 10: mod_base = OTHER; note = 2'-O-methyladenosine-3'-phosphate
  modified_base 11: mod_base = OTHER; note = 2'-O-methylguanosine-3'-phosphate
  modified_base 12: mod_base = OTHER; note = 2'-O-methylguanosine-3'-phosphate
  modified_base 13: mod_base = OTHER; note = 2'-O-methyluridine-3'-phosphate
  modified_base 14: mod_base = OTHER; note = 2'-fluoroadenosine-3'-phosphate
  modified_base 15: mod_base = OTHER; note = 2'-O-methylcytidine-3'-phosphate
  modified_base 16: mod_base = OTHER; note = 2'-fluorouridine-3'-phosphate
  modified_base 17: mod_base = OTHER; note = 2'-O-methylcytidine-3'-phosphate
  modified_base 18: mod_base = OTHER; note = 2'-O-methyluridine-3'-phosphate
  modified_base 19: mod_base = OTHER; note = 2'-O-methylcytidine-3'-phosphate
  modified_base 20: mod_base = OTHER; note = 2'-O-methyladenosine-3'-phosphate
  modified_base 21: mod_base = OTHER; note = 2'-O-methyluridine-3'-phosphorothioate
  modified_base 22: mod_base = OTHER; note = 2'-O-methyluridine-3'-phosphorothioate
  modified_base 23: mod_base = OTHER; note = 2'-O-methylguanosine-3'-phosphate
actgctcacaggtactctcattg

SEQ ID NO: 3403 - RNA, 23 nt, synthetic construct
  source 1..23: mol_type = other RNA
  modified_base 1: mod_base = OTHER; note = 2'-O-methyladenosine-3'-phosphorothioate
  modified_base 2: mod_base = OTHER; note = 2'-fluoroguanosine-3'-phosphorothioate
  modified_base 3: mod_base = OTHER; note = 2'-O-methylcytidine-3'-phosphate
  modified_base 4: mod_base = OTHER; note = 2'-O-methyluridine-3'-phosphate
  modified_base 5: mod_base = OTHER; note = 2'-O-methylguanosine-3'-phosphate
  modified_base 6: mod_base = OTHER; note = 2'-fluorocytidine-3'-phosphate
  modified_base 7: mod_base = OTHER; note = 2'-O-methyluridine-3'-phosphate
  modified_base 8: mod_base = OTHER; note = 2'-fluorocytidine-3'-phosphate
  modified_base 9: mod_base = OTHER; note = 2'-fluoroadenosine-3'-phosphate
  modified_base 10: mod_base = OTHER; note = 2'-O-methylcytidine-3'-phosphate
  modified_base 11: mod_base = OTHER; note = 2'-O-methyladenosine-3'-phosphate
  modified_base 12: mod_base = OTHER; note = 2'-O-methylguanosine-3'-phosphate
  modified_base 13: mod_base = OTHER; note = 2'-O-methylguanosine-3'-phosphate
  modified_base 14: mod_base = OTHER; note = 2'-fluorouridine-3'-phosphate
  modified_base 15: mod_base = OTHER; note = 2'-O-methyladenosine-3'-phosphate
  modified_base 16: mod_base = OTHER; note = 2'-fluorocytidine-3'-phosphate
  modified_base 17: mod_base = OTHER; note = 2'-O-methyluridine-3'-phosphate
  modified_base 18: mod_base = OTHER; note = 2'-O-methylcytidine-3'-phosphate
  modified_base 19: mod_base = OTHER; note = 2'-O-methyluridine-3'-phosphate
  modified_base 20: mod_base = OTHER; note = 2'-O-methylcytidine-3'-phosphate
  modified_base 21: mod_base = OTHER; note = 2'-O-methyladenosine-3'-phosphorothioate
  modified_base 22: mod_base = OTHER; note = 2'-O-methyluridine-3'-phosphorothioate
  modified_base 23: mod_base = OTHER; note = 2'-O-methyluridine-3'-phosphate
agctgctcacaggtactctcatt

SEQ ID NO: 3404 - RNA, 23 nt, synthetic construct
  source 1..23: mol_type = other RNA
  modified_base 1: mod_base = OTHER; note = 2'-O-methyladenosine-3'-phosphorothioate
  modified_base 2: mod_base = OTHER; note = 2'-fluoroadenosine-3'-phosphorothioate
  modified_base 3: mod_base = OTHER; note = 2'-O-methylguanosine-3'-phosphate
  modified_base 4: mod_base = OTHER; note = 2'-O-methylcytidine-3'-phosphate
  modified_base 5: mod_base = OTHER; note = 2'-O-methyluridine-3'-phosphate
  modified_base 6: mod_base = OTHER; note = 2'-fluoroguanosine-3'-phosphate
  modified_base 7: mod_base = OTHER; note = 2'-O-methylcytidine-3'-phosphate
  modified_base 8: mod_base = OTHER; note = 2'-fluorouridine-3'-phosphate
  modified_base 9: mod_base = OTHER; note = 2'-fluorocytidine-3'-phosphate
  modified_base 10: mod_base = OTHER; note = 2'-O-methyladenosine-3'-phosphate
  modified_base 11: mod_base = OTHER; note = 2'-O-methylcytidine-3'-phosphate
  modified_base 12: mod_base = OTHER; note = 2'-O-methyladenosine-3'-phosphate
  modified_base 13: mod_base = OTHER; note = 2'-O-methylguanosine-3'-phosphate
  modified_base 14: mod_base = OTHER; note = 2'-fluoroguanosine-3'-phosphate
  modified_base 15: mod_base = OTHER; note = 2'-O-methyluridine-3'-phosphate
  modified_base 16: mod_base = OTHER; note = 2'-fluoroadenosine-3'-phosphate
  modified_base 17: mod_base = OTHER; note = 2'-O-methylcytidine-3'-phosphate
  modified_base 18: mod_base = OTHER; note = 2'-O-methyluridine-3'-phosphate
  modified_base 19: mod_base = OTHER; note = 2'-O-methylcytidine-3'-phosphate
  modified_base 20: mod_base = OTHER; note = 2'-O-methyluridine-3'-phosphate
  modified_base 21: mod_base = OTHER; note = 2'-O-methylcytidine-3'-phosphorothioate
  modified_base 22: mod_base = OTHER; note = 2'-O-methyladenosine-3'-phosphorothioate
  modified_base 23: mod_base = OTHER; note = 2'-O-methyluridine-3'-phosphate
aagctgctcacaggtactctcat

SEQ ID NO: 3405 - RNA, 23 nt, synthetic construct
  source 1..23: mol_type = other RNA
  modified_base 1: mod_base = OTHER; note = 2'-O-methyladenosine-3'-phosphorothioate
  modified_base 2: mod_base = OTHER; note = 2'-fluorocytidine-3'-phosphorothioate
  modified_base 3: mod_base = OTHER; note = 2'-O-methyladenosine-3'-phosphate
  modified_base 4: mod_base = OTHER; note = 2'-O-methylguanosine-3'-phosphate
  modified_base 5: mod_base = OTHER; note = 2'-O-methylcytidine-3'-phosphate
  modified_base 6: mod_base = OTHER; note = 2'-fluorouridine-3'-phosphate
  modified_base 7: mod_base = OTHER; note = 2'-O-methylguanosine-3'-phosphate
  modified_base 8: mod_base = OTHER; note = 2'-fluorocytidine-3'-phosphate
  modified_base 9: mod_base = OTHER; note = 2'-fluorouridine-3'-phosphate
  modified_base 10: mod_base = OTHER; note = 2'-O-methylcytidine-3'-phosphate
  modified_base 11: mod_base = OTHER; note = 2'-O-methyladenosine-3'-phosphate
  modified_base 12: mod_base = OTHER; note = 2'-O-methylcytidine-3'-phosphate
  modified_base 13: mod_base = OTHER; note = 2'-O-methyladenosine-3'-phosphate
  modified_base 14: mod_base = OTHER; note = 2'-fluoroguanosine-3'-phosphate
  modified_base 15: mod_base = OTHER; note = 2'-O-methylguanosine-3'-phosphate
  modified_base 16: mod_base = OTHER; note = 2'-fluorouridine-3'-phosphate
  modified_base 17: mod_base = OTHER; note = 2'-O-methyladenosine-3'-phosphate
  modified_base 18: mod_base = OTHER; note = 2'-O-methylcytidine-3'-phosphate
  modified_base 19: mod_base = OTHER; note = 2'-O-methyluridine-3'-phosphate
  modified_base 20: mod_base = OTHER; note = 2'-O-methylcytidine-3'-phosphate
  modified_base 21: mod_base = OTHER; note = 2'-O-methyluridine-3'-phosphorothioate
  modified_base 22: mod_base = OTHER; note = 2'-O-methylcytidine-3'-phosphorothioate
  modified_base 23: mod_base = OTHER; note = 2'-O-methyladenosine-3'-phosphate
acagctgctcacaggtactctca

SEQ ID NO: 3406 - RNA, 23 nt, synthetic construct
  source 1..23: mol_type = other RNA
  modified_base 1: mod_base = OTHER; note = 2'-O-methyladenosine-3'-phosphorothioate
  modified_base 2: mod_base = OTHER; note = 2'-fluorocytidine-3'-phosphorothioate
  modified_base 3: mod_base = OTHER; note = 2'-O-methylcytidine-3'-phosphate
  modified_base 4: mod_base = OTHER; note = 2'-O-methyladenosine-3'-phosphate
  modified_base 5: mod_base = OTHER; note = 2'-O-methylguanosine-3'-phosphate
  modified_base 6: mod_base = OTHER; note = 2'-fluorocytidine-3'-phosphate
  modified_base 7: mod_base = OTHER; note = 2'-O-methyluridine-3'-phosphate
  modified_base 8: mod_base = OTHER; note = 2'-fluoroguanosine-3'-phosphate
  modified_base 9: mod_base = OTHER; note = 2'-fluorocytidine-3'-phosphate
  modified_base 10: mod_base = OTHER; note = 2'-O-methyluridine-3'-phosphate
  modified_base 11: mod_base = OTHER; note = 2'-O-methylcytidine-3'-phosphate
  modified_base 12: mod_base = OTHER; note = 2'-O-methyladenosine-3'-phosphate
  modified_base 13: mod_base = OTHER; note = 2'-O-methylcytidine-3'-phosphate
  modified_base 14: mod_base = OTHER; note = 2'-fluoroadenosine-3'-phosphate
  modified_base 15: mod_base = OTHER; note = 2'-O-methylguanosine-3'-phosphate
  modified_base 16: mod_base = OTHER; note = 2'-fluoroguanosine-3'-phosphate
  modified_base 17: mod_base = OTHER; note = 2'-O-methyluridine-3'-phosphate
  modified_base 18: mod_base = OTHER; note = 2'-O-methyladenosine-3'-phosphate
  modified_base 19: mod_base = OTHER; note = 2'-O-methylcytidine-3'-phosphate
  modified_base 20: mod_base = OTHER; note = 2'-O-methyluridine-3'-phosphate
  modified_base 21: mod_base = OTHER; note = 2'-O-methylcytidine-3'-phosphorothioate
  modified_base 22: mod_base = OTHER; note = 2'-O-methyluridine-3'-phosphorothioate
  modified_base 23: mod_base = OTHER; note = 2'-O-methylcytidine-3'-phosphate
accagctgctcacaggtactctc

SEQ ID NO: 3407 - RNA, 23 nt, synthetic construct
  source 1..23: mol_type = other RNA
  modified_base 1: mod_base = OTHER; note = 2'-O-methyladenosine-3'-phosphorothioate
  modified_base 2: mod_base = OTHER; note = 2'-fluoroguanosine-3'-phosphorothioate
  modified_base 3: mod_base = OTHER; note = 2'-O-methylcytidine-3'-phosphate
  modified_base 4: mod_base = OTHER; note = 2'-O-methylcytidine-3'-phosphate
  modified_base 5: mod_base = OTHER; note = 2'-O-methyladenosine-3'-phosphate
  modified_base 6: mod_base = OTHER; note = 2'-fluoroguanosine-3'-phosphate
  modified_base 7: mod_base = OTHER; note = 2'-O-methylcytidine-3'-phosphate
  modified_base 8: mod_base = OTHER; note = 2'-fluorouridine-3'-phosphate
  modified_base 9: mod_base = OTHER; note = 2'-fluoroguanosine-3'-phosphate
  modified_base 10: mod_base = OTHER; note = 2'-O-methylcytidine-3'-phosphate
  modified_base 11: mod_base = OTHER; note = 2'-O-methyluridine-3'-phosphate
  modified_base 12: mod_base = OTHER; note = 2'-O-methylcytidine-3'-phosphate
  modified_base 13: mod_base = OTHER; note = 2'-O-methyladenosine-3'-phosphate
  modified_base 14: mod_base = OTHER; note = 2'-fluorocytidine-3'-phosphate
  modified_base 15: mod_base = OTHER; note = 2'-O-methyladenosine-3'-phosphate
  modified_base 16: mod_base = OTHER; note = 2'-fluoroguanosine-3'-phosphate
  modified_base 17: mod_base = OTHER; note = 2'-O-methylguanosine-3'-phosphate
  modified_base 18: mod_base = OTHER; note = 2'-O-methyluridine-3'-phosphate
  modified_base 19: mod_base = OTHER; note = 2'-O-methyladenosine-3'-phosphate
  modified_base 20: mod_base = OTHER; note = 2'-O-methylcytidine-3'-phosphate
  modified_base 21: mod_base = OTHER; note = 2'-O-methyluridine-3'-phosphorothioate
  modified_base 22: mod_base = OTHER; note = 2'-O-methylcytidine-3'-phosphorothioate
  modified_base 23: mod_base = OTHER; note = 2'-O-methyluridine-3'-phosphate
agccagctgctcacaggtactct

SEQ ID NO: 3408 - RNA, 23 nt, synthetic construct
  source 1..23: mol_type = other RNA
  modified_base 1: mod_base = OTHER; note = 2'-O-methyladenosine-3'-phosphorothioate
  modified_base 2: mod_base = OTHER; note = 2'-fluorouridine -3'-phosphorothioate
  modified_base 3: mod_base = OTHER; note = 2'-O-methylguanosine-3'-phosphate
  modified_base 4: mod_base = OTHER; note = 2'-O-methylcytidine-3'-phosphate
  modified_base 5: mod_base = OTHER; note = 2'-O-methylcytidine-3'-phosphate
  modified_base 6: mod_base = OTHER; note = 2'-fluoroadenosine-3'-phosphate
  modified_base 7: mod_base = OTHER; note = 2'-O-methylguanosine-3'-phosphate
  modified_base 8: mod_base = OTHER; note = 2'-fluorocytidine-3'-phosphate
  modified_base 9: mod_base = OTHER; note = 2'-fluorouridine-3'-phosphate
  modified_base 10: mod_base = OTHER; note = 2'-O-methylguanosine-3'-phosphate
  modified_base 11: mod_base = OTHER; note = 2'-O-methylcytidine-3'-phosphate
  modified_base 12: mod_base = OTHER; note = 2'-O-methyluridine-3'-phosphate
  modified_base 13: mod_base = OTHER; note = 2'-O-methylcytidine-3'-phosphate
  modified_base 14: mod_base = OTHER; note = 2'-fluoroadenosine-3'-phosphate
  modified_base 15: mod_base = OTHER; note = 2'-O-methylcytidine-3'-phosphate
  modified_base 16: mod_base = OTHER; note = 2'-fluoroadenosine-3'-phosphate
  modified_base 17: mod_base = OTHER; note = 2'-O-methylguanosine-3'-phosphate
  modified_base 18: mod_base = OTHER; note = 2'-O-methylguanosine-3'-phosphate
  modified_base 19: mod_base = OTHER; note = 2'-O-methyluridine-3'-phosphate
  modified_base 20: mod_base = OTHER; note = 2'-O-methyladenosine-3'-phosphate
  modified_base 21: mod_base = OTHER; note = 2'-O-methylcytidine-3'-phosphorothioate
  modified_base 22: mod_base = OTHER; note = 2'-O-methyluridine-3'-phosphorothioate
  modified_base 23: mod_base = OTHER; note = 2'-O-methylcytidine-3'-phosphate
atgccagctgctcacaggtactc

SEQ ID NO: 3409 - RNA, 23 nt, synthetic construct
  source 1..23: mol_type = other RNA
  modified_base 1: mod_base = OTHER; note = 2'-O-methyladenosine-3'-phosphorothioate
  modified_base 2: mod_base = OTHER; note = 2'-fluorouridine -3'-phosphorothioate
  modified_base 3: mod_base = OTHER; note = 2'-O-methyluridine-3'-phosphate
  modified_base 4: mod_base = OTHER; note = 2'-O-methylguanosine-3'-phosphate
  modified_base 5: mod_base = OTHER; note = 2'-O-methylcytidine-3'-phosphate
  modified_base 6: mod_base = OTHER; note = 2'-fluorocytidine-3'-phosphate
  modified_base 7: mod_base = OTHER; note = 2'-O-methyladenosine-3'-phosphate
  modified_base 8: mod_base = OTHER; note = 2'-fluoroguanosine-3'-phosphate
  modified_base 9: mod_base = OTHER; note = 2'-fluorocytidine-3'-phosphate
  modified_base 10: mod_base = OTHER; note = 2'-O-methyluridine-3'-phosphate
  modified_base 11: mod_base = OTHER; note = 2'-O-methylguanosine-3'-phosphate
  modified_base 12: mod_base = OTHER; note = 2'-O-methylcytidine-3'-phosphate
  modified_base 13: mod_base = OTHER; note = 2'-O-methyluridine-3'-phosphate
  modified_base 14: mod_base = OTHER; note = 2'-fluorocytidine-3'-phosphate
  modified_base 15: mod_base = OTHER; note = 2'-O-methyladenosine-3'-phosphate
  modified_base 16: mod_base = OTHER; note = 2'-fluorocytidine-3'-phosphate
  modified_base 17: mod_base = OTHER; note = 2'-O-methyladenosine-3'-phosphate
  modified_base 18: mod_base = OTHER; note = 2'-O-methylguanosine-3'-phosphate
  modified_base 19: mod_base = OTHER; note = 2'-O-methylguanosine-3'-phosphate
  modified_base 20: mod_base = OTHER; note = 2'-O-methyluridine-3'-phosphate
  modified_base 21: mod_base = OTHER; note = 2'-O-methyladenosine-3'-phosphorothioate
  modified_base 22: mod_base = OTHER; note = 2'-O-methylcytidine-3'-phosphorothioate
  modified_base 23: mod_base = OTHER; note = 2'-O-methyluridine-3'-phosphate
attgccagctgctcacaggtact

SEQ ID NO: 3410 - RNA, 23 nt, synthetic construct
  source 1..23: mol_type = other RNA
  modified_base 1: mod_base = OTHER; note = 2'-O-methyladenosine-3'-phosphorothioate
  modified_base 2: mod_base = OTHER; note = 2'-fluorouridine -3'-phosphorothioate
  modified_base 3: mod_base = OTHER; note = 2'-O-methylguanosine-3'-phosphate
  modified_base 4: mod_base = OTHER; note = 2'-O-methylguanosine-3'-phosphate
  modified_base 5: mod_base = OTHER; note = 2'-O-methylcytidine-3'-phosphate
  modified_base 6: mod_base = OTHER; note = 2'-fluorocytidine-3'-phosphate
  modified_base 7: mod_base = OTHER; note = 2'-O-methyladenosine-3'-phosphate
  modified_base 8: mod_base = OTHER; note = 2'-fluoroguanosine-3'-phosphate
  modified_base 9: mod_base = OTHER; note = 2'-fluorocytidine-3'-phosphate
  modified_base 10: mod_base = OTHER; note = 2'-O-methyladenosine-3'-phosphate
  modified_base 11: mod_base = OTHER; note = 2'-O-methyluridine-3'-phosphate
  modified_base 12: mod_base = OTHER; note = 2'-O-methylcytidine-3'-phosphate
  modified_base 13: mod_base = OTHER; note = 2'-O-methylcytidine-3'-phosphate
  modified_base 14: mod_base = OTHER; note = 2'-fluorocytidine-3'-phosphate
  modified_base 15: mod_base = OTHER; note = 2'-O-methylguanosine-3'-phosphate
  modified_base 16: mod_base = OTHER; note = 2'-fluoroadenosine-3'-phosphate
  modified_base 17: mod_base = OTHER; note = 2'-O-methylcytidine-3'-phosphate
  modified_base 18: mod_base = OTHER; note = 2'-O-methylcytidine-3'-phosphate
  modified_base 19: mod_base = OTHER; note = 2'-O-methyladenosine-3'-phosphate
  modified_base 20: mod_base = OTHER; note = 2'-O-methyluridine-3'-phosphate
  modified_base 21: mod_base = OTHER; note = 2'-O-methyluridine-3'-phosphorothioate
  modified_base 22: mod_base = OTHER; note = 2'-O-methylguanosine-3'-phosphorothioate
  modified_base 23: mod_base = OTHER; note = 2'-O-methylcytidine-3'-phosphate
atggccagcatcccgaccattgc

SEQ ID NO: 3411 - RNA, 23 nt, synthetic construct
  source 1..23: mol_type = other RNA
  modified_base 1: mod_base = OTHER; note = 2'-O-methyladenosine-3'-phosphorothioate
  modified_base 2: mod_base = OTHER; note = 2'-fluorouridine -3'-phosphorothioate
  modified_base 3: mod_base = OTHER; note = 2'-O-methyluridine-3'-phosphate
  modified_base 4: mod_base = OTHER; note = 2'-O-methylguanosine-3'-phosphate
  modified_base 5: mod_base = OTHER; note = 2'-O-methylguanosine-3'-phosphate
  modified_base 6: mod_base = OTHER; note = 2'-fluorocytidine-3'-phosphate
  modified_base 7: mod_base = OTHER; note = 2'-O-methylcytidine-3'-phosphate
  modified_base 8: mod_base = OTHER; note = 2'-fluoroadenosine-3'-phosphate
  modified_base 9: mod_base = OTHER; note = 2'-fluoroguanosine-3'-phosphate
  modified_base 10: mod_base = OTHER; note = 2'-O-methylcytidine-3'-phosphate
  modified_base 11: mod_base = OTHER; note = 2'-O-methyladenosine-3'-phosphate
  modified_base 12: mod_base = OTHER; note = 2'-O-methyluridine-3'-phosphate
  modified_base 13: mod_base = OTHER; note = 2'-O-methylcytidine-3'-phosphate
  modified_base 14: mod_base = OTHER; note = 2'-fluorocytidine-3'-phosphate
  modified_base 15: mod_base = OTHER; note = 2'-O-methylcytidine-3'-phosphate
  modified_base 16: mod_base = OTHER; note = 2'-fluoroguanosine-3'-phosphate
  modified_base 17: mod_base = OTHER; note = 2'-O-methyladenosine-3'-phosphate
  modified_base 18: mod_base = OTHER; note = 2'-O-methylcytidine-3'-phosphate
  modified_base 19: mod_base = OTHER; note = 2'-O-methylcytidine-3'-phosphate
  modified_base 20: mod_base = OTHER; note = 2'-O-methyladenosine-3'-phosphate
  modified_base 21: mod_base = OTHER; note = 2'-O-methyluridine-3'-phosphorothioate
  modified_base 22: mod_base = OTHER; note = 2'-O-methyluridine-3'-phosphorothioate
  modified_base 23: mod_base = OTHER; note = 2'-O-methylguanosine-3'-phosphate
attggccagcatcccgaccattg

SEQ ID NO: 3412 - RNA, 23 nt, synthetic construct
  source 1..23: mol_type = other RNA
  modified_base 1: mod_base = OTHER; note = 2'-O-methyladenosine-3'-phosphorothioate
  modified_base 2: mod_base = OTHER; note = 2'-fluoroguanosine-3'-phosphorothioate
  modified_base 3: mod_base = OTHER; note = 2'-O-methyluridine-3'-phosphate
  modified_base 4: mod_base = OTHER; note = 2'-O-methyluridine-3'-phosphate
  modified_base 5: mod_base = OTHER; note = 2'-O-methylguanosine-3'-phosphate
  modified_base 6: mod_base = OTHER; note = 2'-fluoroguanosine-3'-phosphate
  modified_base 7: mod_base = OTHER; note = 2'-O-methylcytidine-3'-phosphate
  modified_base 8: mod_base = OTHER; note = 2'-fluorocytidine-3'-phosphate
  modified_base 9: mod_base = OTHER; note = 2'-fluoroadenosine-3'-phosphate
  modified_base 10: mod_base = OTHER; note = 2'-O-methylguanosine-3'-phosphate
  modified_base 11: mod_base = OTHER; note = 2'-O-methylcytidine-3'-phosphate
  modified_base 12: mod_base = OTHER; note = 2'-O-methyladenosine-3'-phosphate
  modified_base 13: mod_base = OTHER; note = 2'-O-methyluridine-3'-phosphate
  modified_base 14: mod_base = OTHER; note = 2'-fluorocytidine-3'-phosphate
  modified_base 15: mod_base = OTHER; note = 2'-O-methylcytidine-3'-phosphate
  modified_base 16: mod_base = OTHER; note = 2'-fluorocytidine-3'-phosphate
  modified_base 17: mod_base = OTHER; note = 2'-O-methylguanosine-3'-phosphate
  modified_base 18: mod_base = OTHER; note = 2'-O-methyladenosine-3'-phosphate
  modified_base 19: mod_base = OTHER; note = 2'-O-methylcytidine-3'-phosphate
  modified_base 20: mod_base = OTHER; note = 2'-O-methylcytidine-3'-phosphate
  modified_base 21: mod_base = OTHER; note = 2'-O-methyladenosine-3'-phosphorothioate
  modified_base 22: mod_base = OTHER; note = 2'-O-methyluridine-3'-phosphorothioate
  modified_base 23: mod_base = OTHER; note = 2'-O-methyluridine-3'-phosphate
agttggccagcatcccgaccatt

SEQ ID NO: 3413 - RNA, 23 nt, synthetic construct
  source 1..23: mol_type = other RNA
  modified_base 1: mod_base = OTHER; note = 2'-O-methyladenosine-3'-phosphorothioate
  modified_base 2: mod_base = OTHER; note = 2'-fluoroadenosine-3'-phosphorothioate
  modified_base 3: mod_base = OTHER; note = 2'-O-methylguanosine-3'-phosphate
  modified_base 4: mod_base = OTHER; note = 2'-O-methyluridine-3'-phosphate
  modified_base 5: mod_base = OTHER; note = 2'-O-methyluridine-3'-phosphate
  modified_base 6: mod_base = OTHER; note = 2'-fluoroguanosine-3'-phosphate
  modified_base 7: mod_base = OTHER; note = 2'-O-methylguanosine-3'-phosphate
  modified_base 8: mod_base = OTHER; note = 2'-fluorocytidine-3'-phosphate
  modified_base 9: mod_base = OTHER; note = 2'-fluorocytidine-3'-phosphate
  modified_base 10: mod_base = OTHER; note = 2'-O-methyladenosine-3'-phosphate
  modified_base 11: mod_base = OTHER; note = 2'-O-methylguanosine-3'-phosphate
  modified_base 12: mod_base = OTHER; note = 2'-O-methylcytidine-3'-phosphate
  modified_base 13: mod_base = OTHER; note = 2'-O-methyladenosine-3'-phosphate
  modified_base 14: mod_base = OTHER; note = 2'-fluorouridine-3'-phosphate
  modified_base 15: mod_base = OTHER; note = 2'-O-methylcytidine-3'-phosphate
  modified_base 16: mod_base = OTHER; note = 2'-fluorocytidine-3'-phosphate
  modified_base 17: mod_base = OTHER; note = 2'-O-methylcytidine-3'-phosphate
  modified_base 18: mod_base = OTHER; note = 2'-O-methylguanosine-3'-phosphate
  modified_base 19: mod_base = OTHER; note = 2'-O-methyladenosine-3'-phosphate
  modified_base 20: mod_base = OTHER; note = 2'-O-methylcytidine-3'-phosphate
  modified_base 21: mod_base = OTHER; note = 2'-O-methylcytidine-3'-phosphorothioate
  modified_base 22: mod_base = OTHER; note = 2'-O-methyladenosine-3'-phosphorothioate
  modified_base 23: mod_base = OTHER; note = 2'-O-methyluridine-3'-phosphate
aagttggccagcatcccgaccat

SEQ ID NO: 3414 - RNA, 23 nt, synthetic construct
  source 1..23: mol_type = other RNA
  modified_base 1: mod_base = OTHER; note = 2'-O-methyladenosine-3'-phosphorothioate
  modified_base 2: mod_base = OTHER; note = 2'-fluoroadenosine-3'-phosphorothioate
  modified_base 3: mod_base = OTHER; note = 2'-O-methyladenosine-3'-phosphate
  modified_base 4: mod_base = OTHER; note = 2'-O-methylguanosine-3'-phosphate
  modified_base 5: mod_base = OTHER; note = 2'-O-methyluridine-3'-phosphate
  modified_base 6: mod_base = OTHER; note = 2'-fluorouridine-3'-phosphate
  modified_base 7: mod_base = OTHER; note = 2'-O-methylguanosine-3'-phosphate
  modified_base 8: mod_base = OTHER; note = 2'-fluoroguanosine-3'-phosphate
  modified_base 9: mod_base = OTHER; note = 2'-fluorocytidine-3'-phosphate
  modified_base 10: mod_base = OTHER; note = 2'-O-methylcytidine-3'-phosphate
  modified_base 11: mod_base = OTHER; note = 2'-O-methyladenosine-3'-phosphate
  modified_base 12: mod_base = OTHER; note = 2'-O-methylguanosine-3'-phosphate
  modified_base 13: mod_base = OTHER; note = 2'-O-methylcytidine-3'-phosphate
  modified_base 14: mod_base = OTHER; note = 2'-fluoroadenosine-3'-phosphate
  modified_base 15: mod_base = OTHER; note = 2'-O-methyluridine-3'-phosphate
  modified_base 16: mod_base = OTHER; note = 2'-fluorocytidine-3'-phosphate
  modified_base 17: mod_base = OTHER; note = 2'-O-methylcytidine-3'-phosphate
  modified_base 18: mod_base = OTHER; note = 2'-O-methylcytidine-3'-phosphate
  modified_base 19: mod_base = OTHER; note = 2'-O-methylguanosine-3'-phosphate
  modified_base 20: mod_base = OTHER; note = 2'-O-methyladenosine-3'-phosphate
  modified_base 21: mod_base = OTHER; note = 2'-O-methylcytidine-3'-phosphorothioate
  modified_base 22: mod_base = OTHER; note = 2'-O-methylcytidine-3'-phosphorothioate
  modified_base 23: mod_base = OTHER; note = 2'-O-methyladenosine-3'-phosphate
aaagttggccagcatcccgacca

SEQ ID NO: 3415 - RNA, 23 nt, synthetic construct
  source 1..23: mol_type = other RNA
  modified_base 1: mod_base = OTHER; note = 2'-O-methyladenosine-3'-phosphorothioate
  modified_base 2: mod_base = OTHER; note = 2'-fluoroguanosine-3'-phosphorothioate
  modified_base 3: mod_base = OTHER; note = 2'-O-methyladenosine-3'-phosphate
  modified_base 4: mod_base = OTHER; note = 2'-O-methyladenosine-3'-phosphate
  modified_base 5: mod_base = OTHER; note = 2'-O-methylguanosine-3'-phosphate
  modified_base 6: mod_base = OTHER; note = 2'-fluorouridine-3'-phosphate
  modified_base 7: mod_base = OTHER; note = 2'-O-methyluridine-3'-phosphate
  modified_base 8: mod_base = OTHER; note = 2'-fluoroguanosine-3'-phosphate
  modified_base 9: mod_base = OTHER; note = 2'-fluoroguanosine-3'-phosphate
  modified_base 10: mod_base = OTHER; note = 2'-O-methylcytidine-3'-phosphate
  modified_base 11: mod_base = OTHER; note = 2'-O-methylcytidine-3'-phosphate
  modified_base 12: mod_base = OTHER; note = 2'-O-methyladenosine-3'-phosphate
  modified_base 13: mod_base = OTHER; note = 2'-O-methylguanosine-3'-phosphate
  modified_base 14: mod_base = OTHER; note = 2'-fluorocytidine-3'-phosphate
  modified_base 15: mod_base = OTHER; note = 2'-O-methyladenosine-3'-phosphate
  modified_base 16: mod_base = OTHER; note = 2'-fluorouridine-3'-phosphate
  modified_base 17: mod_base = OTHER; note = 2'-O-methylcytidine-3'-phosphate
  modified_base 18: mod_base = OTHER; note = 2'-O-methylcytidine-3'-phosphate
  modified_base 19: mod_base = OTHER; note = 2'-O-methylcytidine-3'-phosphate
  modified_base 20: mod_base = OTHER; note = 2'-O-methylguanosine-3'-phosphate
  modified_base 21: mod_base = OTHER; note = 2'-O-methyladenosine-3'-phosphorothioate
  modified_base 22: mod_base = OTHER; note = 2'-O-methylcytidine-3'-phosphorothioate
  modified_base 23: mod_base = OTHER; note = 2'-O-methylcytidine-3'-phosphate
agaagttggccagcatcccgacc

SEQ ID NO: 3416 - RNA, 23 nt, synthetic construct
  source 1..23: mol_type = other RNA
  modified_base 1: mod_base = OTHER; note = 2'-O-methyladenosine-3'-phosphorothioate
  modified_base 2: mod_base = OTHER; note = 2'-fluoroadenosine-3'-phosphorothioate
  modified_base 3: mod_base = OTHER; note = 2'-O-methylguanosine-3'-phosphate
  modified_base 4: mod_base = OTHER; note = 2'-O-methyladenosine-3'-phosphate
  modified_base 5: mod_base = OTHER; note = 2'-O-methyladenosine-3'-phosphate
  modified_base 6: mod_base = OTHER; note = 2'-fluoroguanosine-3'-phosphate
  modified_base 7: mod_base = OTHER; note = 2'-O-methyluridine-3'-phosphate
  modified_base 8: mod_base = OTHER; note = 2'-fluorouridine-3'-phosphate
  modified_base 9: mod_base = OTHER; note = 2'-fluoroguanosine-3'-phosphate
  modified_base 10: mod_base = OTHER; note = 2'-O-methylguanosine-3'-phosphate
  modified_base 11: mod_base = OTHER; note = 2'-O-methylcytidine-3'-phosphate
  modified_base 12: mod_base = OTHER; note = 2'-O-methylcytidine-3'-phosphate
  modified_base 13: mod_base = OTHER; note = 2'-O-methyladenosine-3'-phosphate
  modified_base 14: mod_base = OTHER; note = 2'-fluoroguanosine-3'-phosphate
  modified_base 15: mod_base = OTHER; note = 2'-O-methylcytidine-3'-phosphate
  modified_base 16: mod_base = OTHER; note = 2'-fluoroadenosine-3'-phosphate
  modified_base 17: mod_base = OTHER; note = 2'-O-methyluridine-3'-phosphate
  modified_base 18: mod_base = OTHER; note = 2'-O-methylcytidine-3'-phosphate
  modified_base 19: mod_base = OTHER; note = 2'-O-methylcytidine-3'-phosphate
  modified_base 20: mod_base = OTHER; note = 2'-O-methylcytidine-3'-phosphate
  modified_base 21: mod_base = OTHER; note = 2'-O-methylguanosine-3'-phosphorothioate
  modified_base 22: mod_base = OTHER; note = 2'-O-methyladenosine-3'-phosphorothioate
  modified_base 23: mod_base = OTHER; note = 2'-O-methylcytidine-3'-phosphate
aagaagttggccagcatcccgac

SEQ ID NO: 3417 - RNA, 23 nt, synthetic construct
  source 1..23: mol_type = other RNA
  modified_base 1: mod_base = OTHER; note = 2'-O-methyladenosine-3'-phosphorothioate
  modified_base 2: mod_base = OTHER; note = 2'-fluorocytidine-3'-phosphorothioate
  modified_base 3: mod_base = OTHER; note = 2'-O-methyladenosine-3'-phosphate
  modified_base 4: mod_base = OTHER; note = 2'-O-methyladenosine-3'-phosphate
  modified_base 5: mod_base = OTHER; note = 2'-O-methylguanosine-3'-phosphate
  modified_base 6: mod_base = OTHER; note = 2'-fluoroadenosine-3'-phosphate
  modified_base 7: mod_base = OTHER; note = 2'-O-methyladenosine-3'-phosphate
  modified_base 8: mod_base = OTHER; note = 2'-fluoroguanosine-3'-phosphate
  modified_base 9: mod_base = OTHER; note = 2'-fluorouridine-3'-phosphate
  modified_base 10: mod_base = OTHER; note = 2'-O-methyluridine-3'-phosphate
  modified_base 11: mod_base = OTHER; note = 2'-O-methylguanosine-3'-phosphate
  modified_base 12: mod_base = OTHER; note = 2'-O-methylguanosine-3'-phosphate
  modified_base 13: mod_base = OTHER; note = 2'-O-methylcytidine-3'-phosphate
  modified_base 14: mod_base = OTHER; note = 2'-fluorocytidine-3'-phosphate
  modified_base 15: mod_base = OTHER; note = 2'-O-methyladenosine-3'-phosphate
  modified_base 16: mod_base = OTHER; note = 2'-fluoroguanosine-3'-phosphate
  modified_base 17: mod_base = OTHER; note = 2'-O-methylcytidine-3'-phosphate
  modified_base 18: mod_base = OTHER; note = 2'-O-methyladenosine-3'-phosphate
  modified_base 19: mod_base = OTHER; note = 2'-O-methyluridine-3'-phosphate
  modified_base 20: mod_base = OTHER; note = 2'-O-methylcytidine-3'-phosphate
  modified_base 21: mod_base = OTHER; note = 2'-O-methylcytidine-3'-phosphorothioate
  modified_base 22: mod_base = OTHER; note = 2'-O-methylcytidine-3'-phosphorothioate
  modified_base 23: mod_base = OTHER; note = 2'-O-methylguanosine-3'-phosphate
acaagaagttggccagcatcccg

SEQ ID NO: 3418 - RNA, 23 nt, synthetic construct
  source 1..23: mol_type = other RNA
  modified_base 1: mod_base = OTHER; note = 2'-O-methyladenosine-3'-phosphorothioate
  modified_base 2: mod_base = OTHER; note = 2'-fluorocytidine-3'-phosphorothioate
  modified_base 3: mod_base = OTHER; note = 2'-O-methylcytidine-3'-phosphate
  modified_base 4: mod_base = OTHER; note = 2'-O-methyladenosine-3'-phosphate
  modified_base 5: mod_base = OTHER; note = 2'-O-methyladenosine-3'-phosphate
  modified_base 6: mod_base = OTHER; note = 2'-fluoroguanosine-3'-phosphate
  modified_base 7: mod_base = OTHER; note = 2'-O-methyladenosine-3'-phosphate
  modified_base 8: mod_base = OTHER; note = 2'-fluoroadenosine-3'-phosphate
  modified_base 9: mod_base = OTHER; note = 2'-fluoroguanosine-3'-phosphate
  modified_base 10: mod_base = OTHER; note = 2'-O-methyluridine-3'-phosphate
  modified_base 11: mod_base = OTHER; note = 2'-O-methyluridine-3'-phosphate
  modified_base 12: mod_base = OTHER; note = 2'-O-methylguanosine-3'-phosphate
  modified_base 13: mod_base = OTHER; note = 2'-O-methylguanosine-3'-phosphate
  modified_base 14: mod_base = OTHER; note = 2'-fluorocytidine-3'-phosphate
  modified_base 15: mod_base = OTHER; note = 2'-O-methylcytidine-3'-phosphate
  modified_base 16: mod_base = OTHER; note = 2'-fluoroadenosine-3'-phosphate
  modified_base 17: mod_base = OTHER; note = 2'-O-methylguanosine-3'-phosphate
  modified_base 18: mod_base = OTHER; note = 2'-O-methylcytidine-3'-phosphate
  modified_base 19: mod_base = OTHER; note = 2'-O-methyladenosine-3'-phosphate
  modified_base 20: mod_base = OTHER; note = 2'-O-methyluridine-3'-phosphate
  modified_base 21: mod_base = OTHER; note = 2'-O-methylcytidine-3'-phosphorothioate
  modified_base 22: mod_base = OTHER; note = 2'-O-methylcytidine-3'-phosphorothioate
  modified_base 23: mod_base = OTHER; note = 2'-O-methylcytidine-3'-phosphate
accaagaagttggccagcatccc

SEQ ID NO: 3419 - RNA, 23 nt, synthetic construct
  source 1..23: mol_type = other RNA
  modified_base 1: mod_base = OTHER; note = 2'-O-methyladenosine-3'-phosphorothioate
  modified_base 2: mod_base = OTHER; note = 2'-fluoroadenosine-3'-phosphorothioate
  modified_base 3: mod_base = OTHER; note = 2'-O-methyladenosine-3'-phosphate
  modified_base 4: mod_base = OTHER; note = 2'-O-methylguanosine-3'-phosphate
  modified_base 5: mod_base = OTHER; note = 2'-O-methylcytidine-3'-phosphate
  modified_base 6: mod_base = OTHER; note = 2'-fluorocytidine-3'-phosphate
  modified_base 7: mod_base = OTHER; note = 2'-O-methylcytidine-3'-phosphate
  modified_base 8: mod_base = OTHER; note = 2'-fluoroadenosine-3'-phosphate
  modified_base 9: mod_base = OTHER; note = 2'-fluoroadenosine-3'-phosphate
  modified_base 10: mod_base = OTHER; note = 2'-O-methylguanosine-3'-phosphate
  modified_base 11: mod_base = OTHER; note = 2'-O-methyladenosine-3'-phosphate
  modified_base 12: mod_base = OTHER; note = 2'-O-methyladenosine-3'-phosphate
  modified_base 13: mod_base = OTHER; note = 2'-O-methylguanosine-3'-phosphate
  modified_base 14: mod_base = OTHER; note = 2'-fluorouridine-3'-phosphate
  modified_base 15: mod_base = OTHER; note = 2'-O-methyluridine-3'-phosphate
  modified_base 16: mod_base = OTHER; note = 2'-fluoroguanosine-3'-phosphate
  modified_base 17: mod_base = OTHER; note = 2'-O-methylguanosine-3'-phosphate
  modified_base 18: mod_base = OTHER; note = 2'-O-methylcytidine-3'-phosphate
  modified_base 19: mod_base = OTHER; note = 2'-O-methylcytidine-3'-phosphate
  modified_base 20: mod_base = OTHER; note = 2'-O-methyladenosine-3'-phosphate
  modified_base 21: mod_base = OTHER; note = 2'-O-methylguanosine-3'-phosphorothioate
  modified_base 22: mod_base = OTHER; note = 2'-O-methylcytidine-3'-phosphorothioate
  modified_base 23: mod_base = OTHER; note = 2'-O-methyladenosine-3'-phosphate
aaagcccaagaagttggccagca

SEQ ID NO: 3420 - RNA, 23 nt, synthetic construct
  source 1..23: mol_type = other RNA
  modified_base 1: mod_base = OTHER; note = 2'-O-methyladenosine-3'-phosphorothioate
  modified_base 2: mod_base = OTHER; note = 2'-fluorocytidine-3'-phosphorothioate
  modified_base 3: mod_base = OTHER; note = 2'-O-methylguanosine-3'-phosphate
  modified_base 4: mod_base = OTHER; note = 2'-O-methylguanosine-3'-phosphate
  modified_base 5: mod_base = OTHER; note = 2'-O-methyladenosine-3'-phosphate
  modified_base 6: mod_base = OTHER; note = 2'-fluoroadenosine-3'-phosphate
  modified_base 7: mod_base = OTHER; note = 2'-O-methylguanosine-3'-phosphate
  modified_base 8: mod_base = OTHER; note = 2'-fluorocytidine-3'-phosphate
  modified_base 9: mod_base = OTHER; note = 2'-fluorocytidine-3'-phosphate
  modified_base 10: mod_base = OTHER; note = 2'-O-methylcytidine-3'-phosphate
  modified_base 11: mod_base = OTHER; note = 2'-O-methyladenosine-3'-phosphate
  modified_base 12: mod_base = OTHER; note = 2'-O-methyladenosine-3'-phosphate
  modified_base 13: mod_base = OTHER; note = 2'-O-methylguanosine-3'-phosphate
  modified_base 14: mod_base = OTHER; note = 2'-fluoroadenosine-3'-phosphate
  modified_base 15: mod_base = OTHER; note = 2'-O-methyladenosine-3'-phosphate
  modified_base 16: mod_base = OTHER; note = 2'-fluoroguanosine-3'-phosphate
  modified_base 17: mod_base = OTHER; note = 2'-O-methyluridine-3'-phosphate
  modified_base 18: mod_base = OTHER; note = 2'-O-methyluridine-3'-phosphate
  modified_base 19: mod_base = OTHER; note = 2'-O-methylguanosine-3'-phosphate
  modified_base 20: mod_base = OTHER; note = 2'-O-methylguanosine-3'-phosphate
  modified_base 21: mod_base = OTHER; note = 2'-O-methylcytidine-3'-phosphorothioate
  modified_base 22: mod_base = OTHER; note = 2'-O-methylcytidine-3'-phosphorothioate
  modified_base 23: mod_base = OTHER; note = 2'-O-methyladenosine-3'-phosphate
acggaagcccaagaagttggcca

SEQ ID NO: 3421 - RNA, 23 nt, synthetic construct
  source 1..23: mol_type = other RNA
  modified_base 1: mod_base = OTHER; note = 2'-O-methyladenosine-3'-phosphorothioate
  modified_base 2: mod_base = OTHER; note = 2'-fluoroadenosine-3'-phosphorothioate
  modified_base 3: mod_base = OTHER; note = 2'-O-methylcytidine-3'-phosphate
  modified_base 4: mod_base = OTHER; note = 2'-O-methylguanosine-3'-phosphate
  modified_base 5: mod_base = OTHER; note = 2'-O-methylguanosine-3'-phosphate
  modified_base 6: mod_base = OTHER; note = 2'-fluoroadenosine-3'-phosphate
  modified_base 7: mod_base = OTHER; note = 2'-O-methyladenosine-3'-phosphate
  modified_base 8: mod_base = OTHER; note = 2'-fluoroguanosine-3'-phosphate
  modified_base 9: mod_base = OTHER; note = 2'-fluorocytidine-3'-phosphate
  modified_base 10: mod_base = OTHER; note = 2'-O-methylcytidine-3'-phosphate
  modified_base 11: mod_base = OTHER; note = 2'-O-methylcytidine-3'-phosphate
  modified_base 12: mod_base = OTHER; note = 2'-O-methyladenosine-3'-phosphate
  modified_base 13: mod_base = OTHER; note = 2'-O-methyladenosine-3'-phosphate
  modified_base 14: mod_base = OTHER; note = 2'-fluoroguanosine-3'-phosphate
  modified_base 15: mod_base = OTHER; note = 2'-O-methyladenosine-3'-phosphate
  modified_base 16: mod_base = OTHER; note = 2'-fluoroadenosine-3'-phosphate
  modified_base 17: mod_base = OTHER; note = 2'-O-methylguanosine-3'-phosphate
  modified_base 18: mod_base = OTHER; note = 2'-O-methyluridine-3'-phosphate
  modified_base 19: mod_base = OTHER; note = 2'-O-methyluridine-3'-phosphate
  modified_base 20: mod_base = OTHER; note = 2'-O-methylguanosine-3'-phosphate
  modified_base 21: mod_base = OTHER; note = 2'-O-methylguanosine-3'-phosphorothioate
  modified_base 22: mod_base = OTHER; note = 2'-O-methylcytidine-3'-phosphorothioate
  modified_base 23: mod_base = OTHER; note = 2'-O-methylcytidine-3'-phosphate
aacggaagcccaagaagttggcc

SEQ ID NO: 3422 - RNA, 23 nt, synthetic construct
  source 1..23: mol_type = other RNA
  modified_base 1: mod_base = OTHER; note = 2'-O-methyladenosine-3'-phosphorothioate
  modified_base 2: mod_base = OTHER; note = 2'-fluoroadenosine-3'-phosphorothioate
  modified_base 3: mod_base = OTHER; note = 2'-O-methyluridine-3'-phosphate
  modified_base 4: mod_base = OTHER; note = 2'-O-methyladenosine-3'-phosphate
  modified_base 5: mod_base = OTHER; note = 2'-O-methyluridine-3'-phosphate
  modified_base 6: mod_base = OTHER; note = 2'-fluoroadenosine-3'-phosphate
  modified_base 7: mod_base = OTHER; note = 2'-O-methylcytidine-3'-phosphate
  modified_base 8: mod_base = OTHER; note = 2'-fluoroguanosine-3'-phosphate
  modified_base 9: mod_base = OTHER; note = 2'-fluoroguanosine-3'-phosphate
  modified_base 10: mod_base = OTHER; note = 2'-O-methyladenosine-3'-phosphate
  modified_base 11: mod_base = OTHER; note = 2'-O-methyladenosine-3'-phosphate
  modified_base 12: mod_base = OTHER; note = 2'-O-methylguanosine-3'-phosphate
  modified_base 13: mod_base = OTHER; note = 2'-O-methylcytidine-3'-phosphate
  modified_base 14: mod_base = OTHER; note = 2'-fluorocytidine-3'-phosphate
  modified_base 15: mod_base = OTHER; note = 2'-O-methylcytidine-3'-phosphate
  modified_base 16: mod_base = OTHER; note = 2'-fluoroadenosine-3'-phosphate
  modified_base 17: mod_base = OTHER; note = 2'-O-methyladenosine-3'-phosphate
  modified_base 18: mod_base = OTHER; note = 2'-O-methylguanosine-3'-phosphate
  modified_base 19: mod_base = OTHER; note = 2'-O-methyladenosine-3'-phosphate
  modified_base 20: mod_base = OTHER; note = 2'-O-methyladenosine-3'-phosphate
  modified_base 21: mod_base = OTHER; note = 2'-O-methylguanosine-3'-phosphorothioate
  modified_base 22: mod_base = OTHER; note = 2'-O-methyluridine-3'-phosphorothioate
  modified_base 23: mod_base = OTHER; note = 2'-O-methyluridine-3'-phosphate
aatatacggaagcccaagaagtt

SEQ ID NO: 3423 - RNA, 23 nt, synthetic construct
  source 1..23: mol_type = other RNA
  modified_base 1: mod_base = OTHER; note = 2'-O-methyladenosine-3'-phosphorothioate
  modified_base 2: mod_base = OTHER; note = 2'-fluorouridine -3'-phosphorothioate
  modified_base 3: mod_base = OTHER; note = 2'-O-methyladenosine-3'-phosphate
  modified_base 4: mod_base = OTHER; note = 2'-O-methyluridine-3'-phosphate
  modified_base 5: mod_base = OTHER; note = 2'-O-methyladenosine-3'-phosphate
  modified_base 6: mod_base = OTHER; note = 2'-fluorouridine-3'-phosphate
  modified_base 7: mod_base = OTHER; note = 2'-O-methyladenosine-3'-phosphate
  modified_base 8: mod_base = OTHER; note = 2'-fluorocytidine-3'-phosphate
  modified_base 9: mod_base = OTHER; note = 2'-fluoroguanosine-3'-phosphate
  modified_base 10: mod_base = OTHER; note = 2'-O-methylguanosine-3'-phosphate
  modified_base 11: mod_base = OTHER; note = 2'-O-methyladenosine-3'-phosphate
  modified_base 12: mod_base = OTHER; note = 2'-O-methyladenosine-3'-phosphate
  modified_base 13: mod_base = OTHER; note = 2'-O-methylguanosine-3'-phosphate
  modified_base 14: mod_base = OTHER; note = 2'-fluorocytidine-3'-phosphate
  modified_base 15: mod_base = OTHER; note = 2'-O-methylcytidine-3'-phosphate
  modified_base 16: mod_base = OTHER; note = 2'-fluorocytidine-3'-phosphate
  modified_base 17: mod_base = OTHER; note = 2'-O-methyladenosine-3'-phosphate
  modified_base 18: mod_base = OTHER; note = 2'-O-methyladenosine-3'-phosphate
  modified_base 19: mod_base = OTHER; note = 2'-O-methylguanosine-3'-phosphate
  modified_base 20: mod_base = OTHER; note = 2'-O-methyladenosine-3'-phosphate
  modified_base 21: mod_base = OTHER; note = 2'-O-methyladenosine-3'-phosphorothioate
  modified_base 22: mod_base = OTHER; note = 2'-O-methylguanosine-3'-phosphorothioate
  modified_base 23: mod_base = OTHER; note = 2'-O-methyluridine-3'-phosphate
atatatacggaagcccaagaagt

SEQ ID NO: 3424 - RNA, 23 nt, synthetic construct
  source 1..23: mol_type = other RNA
  modified_base 1: mod_base = OTHER; note = 2'-O-methyladenosine-3'-phosphorothioate
  modified_base 2: mod_base = OTHER; note = 2'-fluorocytidine-3'-phosphorothioate
  modified_base 3: mod_base = OTHER; note = 2'-O-methyladenosine-3'-phosphate
  modified_base 4: mod_base = OTHER; note = 2'-O-methyluridine-3'-phosphate
  modified_base 5: mod_base = OTHER; note = 2'-O-methyladenosine-3'-phosphate
  modified_base 6: mod_base = OTHER; note = 2'-fluorouridine-3'-phosphate
  modified_base 7: mod_base = OTHER; note = 2'-O-methyladenosine-3'-phosphate
  modified_base 8: mod_base = OTHER; note = 2'-fluorouridine-3'-phosphate
  modified_base 9: mod_base = OTHER; note = 2'-fluoroadenosine-3'-phosphate
  modified_base 10: mod_base = OTHER; note = 2'-O-methylcytidine-3'-phosphate
  modified_base 11: mod_base = OTHER; note = 2'-O-methylguanosine-3'-phosphate
  modified_base 12: mod_base = OTHER; note = 2'-O-methylguanosine-3'-phosphate
  modified_base 13: mod_base = OTHER; note = 2'-O-methyladenosine-3'-phosphate
  modified_base 14: mod_base = OTHER; note = 2'-fluoroadenosine-3'-phosphate
  modified_base 15: mod_base = OTHER; note = 2'-O-methylguanosine-3'-phosphate
  modified_base 16: mod_base = OTHER; note = 2'-fluorocytidine-3'-phosphate
  modified_base 17: mod_base = OTHER; note = 2'-O-methylcytidine-3'-phosphate
  modified_base 18: mod_base = OTHER; note = 2'-O-methylcytidine-3'-phosphate
  modified_base 19: mod_base = OTHER; note = 2'-O-methyladenosine-3'-phosphate
  modified_base 20: mod_base = OTHER; note = 2'-O-methyladenosine-3'-phosphate
  modified_base 21: mod_base = OTHER; note = 2'-O-methylguanosine-3'-phosphorothioate
  modified_base 22: mod_base = OTHER; note = 2'-O-methyladenosine-3'-phosphorothioate
  modified_base 23: mod_base = OTHER; note = 2'-O-methyladenosine-3'-phosphate
acatatatacggaagcccaagaa

SEQ ID NO: 3425 - RNA, 23 nt, synthetic construct
  source 1..23: mol_type = other RNA
  modified_base 1: mod_base = OTHER; note = 2'-O-methyladenosine-3'-phosphorothioate
  modified_base 2: mod_base = OTHER; note = 2'-fluorouridine -3'-phosphorothioate
  modified_base 3: mod_base = OTHER; note = 2'-O-methylguanosine-3'-phosphate
  modified_base 4: mod_base = OTHER; note = 2'-O-methylcytidine-3'-phosphate
  modified_base 5: mod_base = OTHER; note = 2'-O-methylcytidine-3'-phosphate
  modified_base 6: mod_base = OTHER; note = 2'-fluoroadenosine-3'-phosphate
  modified_base 7: mod_base = OTHER; note = 2'-O-methyluridine-3'-phosphate
  modified_base 8: mod_base = OTHER; note = 2'-fluoroadenosine-3'-phosphate
  modified_base 9: mod_base = OTHER; note = 2'-fluorouridine-3'-phosphate
  modified_base 10: mod_base = OTHER; note = 2'-O-methyladenosine-3'-phosphate
  modified_base 11: mod_base = OTHER; note = 2'-O-methyluridine-3'-phosphate
  modified_base 12: mod_base = OTHER; note = 2'-O-methyladenosine-3'-phosphate
  modified_base 13: mod_base = OTHER; note = 2'-O-methylcytidine-3'-phosphate
  modified_base 14: mod_base = OTHER; note = 2'-fluoroguanosine-3'-phosphate
  modified_base 15: mod_base = OTHER; note = 2'-O-methylguanosine-3'-phosphate
  modified_base 16: mod_base = OTHER; note = 2'-fluoroadenosine-3'-phosphate
  modified_base 17: mod_base = OTHER; note = 2'-O-methyladenosine-3'-phosphate
  modified_base 18: mod_base = OTHER; note = 2'-O-methylguanosine-3'-phosphate
  modified_base 19: mod_base = OTHER; note = 2'-O-methylcytidine-3'-phosphate
  modified_base 20: mod_base = OTHER; note = 2'-O-methylcytidine-3'-phosphate
  modified_base 21: mod_base = OTHER; note = 2'-O-methylcytidine-3'-phosphorothioate
  modified_base 22: mod_base = OTHER; note = 2'-O-methyladenosine-3'-phosphorothioate
  modified_base 23: mod_base = OTHER; note = 2'-O-methyladenosine-3'-phosphate
atgccatatatacggaagcccaa

SEQ ID NO: 3426 - RNA, 23 nt, synthetic construct
  source 1..23: mol_type = other RNA
  modified_base 1: mod_base = OTHER; note = 2'-O-methyladenosine-3'-phosphorothioate
  modified_base 2: mod_base = OTHER; note = 2'-fluoroadenosine-3'-phosphorothioate
  modified_base 3: mod_base = OTHER; note = 2'-O-methyluridine-3'-phosphate
  modified_base 4: mod_base = OTHER; note = 2'-O-methylguanosine-3'-phosphate
  modified_base 5: mod_base = OTHER; note = 2'-O-methylcytidine-3'-phosphate
  modified_base 6: mod_base = OTHER; note = 2'-fluorocytidine-3'-phosphate
  modified_base 7: mod_base = OTHER; note = 2'-O-methyladenosine-3'-phosphate
  modified_base 8: mod_base = OTHER; note = 2'-fluorouridine-3'-phosphate
  modified_base 9: mod_base = OTHER; note = 2'-fluoroadenosine-3'-phosphate
  modified_base 10: mod_base = OTHER; note = 2'-O-methyluridine-3'-phosphate
  modified_base 11: mod_base = OTHER; note = 2'-O-methyladenosine-3'-phosphate
  modified_base 12: mod_base = OTHER; note = 2'-O-methyluridine-3'-phosphate
  modified_base 13: mod_base = OTHER; note = 2'-O-methyladenosine-3'-phosphate
  modified_base 14: mod_base = OTHER; note = 2'-fluorocytidine-3'-phosphate
  modified_base 15: mod_base = OTHER; note = 2'-O-methylguanosine-3'-phosphate
  modified_base 16: mod_base = OTHER; note = 2'-fluoroguanosine-3'-phosphate
  modified_base 17: mod_base = OTHER; note = 2'-O-methyladenosine-3'-phosphate
  modified_base 18: mod_base = OTHER; note = 2'-O-methyladenosine-3'-phosphate
  modified_base 19: mod_base = OTHER; note = 2'-O-methylguanosine-3'-phosphate
  modified_base 20: mod_base = OTHER; note = 2'-O-methylcytidine-3'-phosphate
  modified_base 21: mod_base = OTHER; note = 2'-O-methylcytidine-3'-phosphorothioate
  modified_base 22: mod_base = OTHER; note = 2'-O-methylcytidine-3'-phosphorothioate
  modified_base 23: mod_base = OTHER; note = 2'-O-methyladenosine-3'-phosphate
aatgccatatatacggaagccca

SEQ ID NO: 3427 - RNA, 23 nt, synthetic construct
  source 1..23: mol_type = other RNA
  modified_base 1: mod_base = OTHER; note = 2'-O-methyladenosine-3'-phosphorothioate
  modified_base 2: mod_base = OTHER; note = 2'-fluorocytidine-3'-phosphorothioate
  modified_base 3: mod_base = OTHER; note = 2'-O-methyladenosine-3'-phosphate
  modified_base 4: mod_base = OTHER; note = 2'-O-methyluridine-3'-phosphate
  modified_base 5: mod_base = OTHER; note = 2'-O-methylguanosine-3'-phosphate
  modified_base 6: mod_base = OTHER; note = 2'-fluorocytidine-3'-phosphate
  modified_base 7: mod_base = OTHER; note = 2'-O-methylcytidine-3'-phosphate
  modified_base 8: mod_base = OTHER; note = 2'-fluoroadenosine-3'-phosphate
  modified_base 9: mod_base = OTHER; note = 2'-fluorouridine-3'-phosphate
  modified_base 10: mod_base = OTHER; note = 2'-O-methyladenosine-3'-phosphate
  modified_base 11: mod_base = OTHER; note = 2'-O-methyluridine-3'-phosphate
  modified_base 12: mod_base = OTHER; note = 2'-O-methyladenosine-3'-phosphate
  modified_base 13: mod_base = OTHER; note = 2'-O-methyluridine-3'-phosphate
  modified_base 14: mod_base = OTHER; note = 2'-fluoroadenosine-3'-phosphate
  modified_base 15: mod_base = OTHER; note = 2'-O-methylcytidine-3'-phosphate
  modified_base 16: mod_base = OTHER; note = 2'-fluoroguanosine-3'-phosphate
  modified_base 17: mod_base = OTHER; note = 2'-O-methylguanosine-3'-phosphate
  modified_base 18: mod_base = OTHER; note = 2'-O-methyladenosine-3'-phosphate
  modified_base 19: mod_base = OTHER; note = 2'-O-methyladenosine-3'-phosphate
  modified_base 20: mod_base = OTHER; note = 2'-O-methylguanosine-3'-phosphate
  modified_base 21: mod_base = OTHER; note = 2'-O-methylcytidine-3'-phosphorothioate
  modified_base 22: mod_base = OTHER; note = 2'-O-methylcytidine-3'-phosphorothioate
  modified_base 23: mod_base = OTHER; note = 2'-O-methylcytidine-3'-phosphate
acatgccatatatacggaagccc

SEQ ID NO: 3428 - RNA, 23 nt, synthetic construct
  source 1..23: mol_type = other RNA
  modified_base 1: mod_base = OTHER; note = 2'-O-methyladenosine-3'-phosphorothioate
  modified_base 2: mod_base = OTHER; note = 2'-fluorocytidine-3'-phosphorothioate
  modified_base 3: mod_base = OTHER; note = 2'-O-methyladenosine-3'-phosphate
  modified_base 4: mod_base = OTHER; note = 2'-O-methylcytidine-3'-phosphate
  modified_base 5: mod_base = OTHER; note = 2'-O-methyluridine-3'-phosphate
  modified_base 6: mod_base = OTHER; note = 2'-fluoroguanosine-3'-phosphate
  modified_base 7: mod_base = OTHER; note = 2'-O-methyluridine-3'-phosphate
  modified_base 8: mod_base = OTHER; note = 2'-fluoroguanosine-3'-phosphate
  modified_base 9: mod_base = OTHER; note = 2'-fluorocytidine-3'-phosphate
  modified_base 10: mod_base = OTHER; note = 2'-O-methyladenosine-3'-phosphate
  modified_base 11: mod_base = OTHER; note = 2'-O-methyluridine-3'-phosphate
  modified_base 12: mod_base = OTHER; note = 2'-O-methylguanosine-3'-phosphate
  modified_base 13: mod_base = OTHER; note = 2'-O-methylcytidine-3'-phosphate
  modified_base 14: mod_base = OTHER; note = 2'-fluorocytidine-3'-phosphate
  modified_base 15: mod_base = OTHER; note = 2'-O-methyladenosine-3'-phosphate
  modified_base 16: mod_base = OTHER; note = 2'-fluorouridine-3'-phosphate
  modified_base 17: mod_base = OTHER; note = 2'-O-methyladenosine-3'-phosphate
  modified_base 18: mod_base = OTHER; note = 2'-O-methyluridine-3'-phosphate
  modified_base 19: mod_base = OTHER; note = 2'-O-methyladenosine-3'-phosphate
  modified_base 20: mod_base = OTHER; note = 2'-O-methyluridine-3'-phosphate
  modified_base 21: mod_base = OTHER; note = 2'-O-methyladenosine-3'-phosphorothioate
  modified_base 22: mod_base = OTHER; note = 2'-O-methylcytidine-3'-phosphorothioate
  modified_base 23: mod_base = OTHER; note = 2'-O-methylguanosine-3'-phosphate
acactgtgcatgccatatatacg

SEQ ID NO: 3429 - RNA, 23 nt, synthetic construct
  source 1..23: mol_type = other RNA
  modified_base 1: mod_base = OTHER; note = 2'-O-methyladenosine-3'-phosphorothioate
  modified_base 2: mod_base = OTHER; note = 2'-fluorouridine -3'-phosphorothioate
  modified_base 3: mod_base = OTHER; note = 2'-O-methylcytidine-3'-phosphate
  modified_base 4: mod_base = OTHER; note = 2'-O-methyladenosine-3'-phosphate
  modified_base 5: mod_base = OTHER; note = 2'-O-methylcytidine-3'-phosphate
  modified_base 6: mod_base = OTHER; note = 2'-fluorouridine-3'-phosphate
  modified_base 7: mod_base = OTHER; note = 2'-O-methylguanosine-3'-phosphate
  modified_base 8: mod_base = OTHER; note = 2'-fluorouridine-3'-phosphate
  modified_base 9: mod_base = OTHER; note = 2'-fluoroguanosine-3'-phosphate
  modified_base 10: mod_base = OTHER; note = 2'-O-methylcytidine-3'-phosphate
  modified_base 11: mod_base = OTHER; note = 2'-O-methyladenosine-3'-phosphate
  modified_base 12: mod_base = OTHER; note = 2'-O-methyluridine-3'-phosphate
  modified_base 13: mod_base = OTHER; note = 2'-O-methylguanosine-3'-phosphate
  modified_base 14: mod_base = OTHER; note = 2'-fluorocytidine-3'-phosphate
  modified_base 15: mod_base = OTHER; note = 2'-O-methylcytidine-3'-phosphate
  modified_base 16: mod_base = OTHER; note = 2'-fluoroadenosine-3'-phosphate
  modified_base 17: mod_base = OTHER; note = 2'-O-methyluridine-3'-phosphate
  modified_base 18: mod_base = OTHER; note = 2'-O-methyladenosine-3'-phosphate
  modified_base 19: mod_base = OTHER; note = 2'-O-methyluridine-3'-phosphate
  modified_base 20: mod_base = OTHER; note = 2'-O-methyladenosine-3'-phosphate
  modified_base 21: mod_base = OTHER; note = 2'-O-methyluridine-3'-phosphorothioate
  modified_base 22: mod_base = OTHER; note = 2'-O-methyladenosine-3'-phosphorothioate
  modified_base 23: mod_base = OTHER; note = 2'-O-methylcytidine-3'-phosphate
atcactgtgcatgccatatatac

SEQ ID NO: 3430 - RNA, 23 nt, synthetic construct
  source 1..23: mol_type = other RNA
  modified_base 1: mod_base = OTHER; note = 2'-O-methyladenosine-3'-phosphorothioate
  modified_base 2: mod_base = OTHER; note = 2'-fluoroguanosine-3'-phosphorothioate
  modified_base 3: mod_base = OTHER; note = 2'-O-methylcytidine-3'-phosphate
  modified_base 4: mod_base = OTHER; note = 2'-O-methyluridine-3'-phosphate
  modified_base 5: mod_base = OTHER; note = 2'-O-methylcytidine-3'-phosphate
  modified_base 6: mod_base = OTHER; note = 2'-fluoroadenosine-3'-phosphate
  modified_base 7: mod_base = OTHER; note = 2'-O-methylcytidine-3'-phosphate
  modified_base 8: mod_base = OTHER; note = 2'-fluorouridine-3'-phosphate
  modified_base 9: mod_base = OTHER; note = 2'-fluoroguanosine-3'-phosphate
  modified_base 10: mod_base = OTHER; note = 2'-O-methyluridine-3'-phosphate
  modified_base 11: mod_base = OTHER; note = 2'-O-methylguanosine-3'-phosphate
  modified_base 12: mod_base = OTHER; note = 2'-O-methylcytidine-3'-phosphate
  modified_base 13: mod_base = OTHER; note = 2'-O-methyladenosine-3'-phosphate
  modified_base 14: mod_base = OTHER; note = 2'-fluorouridine-3'-phosphate
  modified_base 15: mod_base = OTHER; note = 2'-O-methylguanosine-3'-phosphate
  modified_base 16: mod_base = OTHER; note = 2'-fluorocytidine-3'-phosphate
  modified_base 17: mod_base = OTHER; note = 2'-O-methylcytidine-3'-phosphate
  modified_base 18: mod_base = OTHER; note = 2'-O-methyladenosine-3'-phosphate
  modified_base 19: mod_base = OTHER; note = 2'-O-methyluridine-3'-phosphate
  modified_base 20: mod_base = OTHER; note = 2'-O-methyladenosine-3'-phosphate
  modified_base 21: mod_base = OTHER; note = 2'-O-methyluridine-3'-phosphorothioate
  modified_base 22: mod_base = OTHER; note = 2'-O-methyladenosine-3'-phosphorothioate
  modified_base 23: mod_base = OTHER; note = 2'-O-methyluridine-3'-phosphate
agctcactgtgcatgccatatat

SEQ ID NO: 3431 - RNA, 23 nt, synthetic construct
  source 1..23: mol_type = other RNA
  modified_base 1: mod_base = OTHER; note = 2'-O-methyladenosine-3'-phosphorothioate
  modified_base 2: mod_base = OTHER; note = 2'-fluoroadenosine-3'-phosphorothioate
  modified_base 3: mod_base = OTHER; note = 2'-O-methylguanosine-3'-phosphate
  modified_base 4: mod_base = OTHER; note = 2'-O-methylcytidine-3'-phosphate
  modified_base 5: mod_base = OTHER; note = 2'-O-methyluridine-3'-phosphate
  modified_base 6: mod_base = OTHER; note = 2'-fluorocytidine-3'-phosphate
  modified_base 7: mod_base = OTHER; note = 2'-O-methyladenosine-3'-phosphate
  modified_base 8: mod_base = OTHER; note = 2'-fluorocytidine-3'-phosphate
  modified_base 9: mod_base = OTHER; note = 2'-fluorouridine-3'-phosphate
  modified_base 10: mod_base = OTHER; note = 2'-O-methylguanosine-3'-phosphate
  modified_base 11: mod_base = OTHER; note = 2'-O-methyluridine-3'-phosphate
  modified_base 12: mod_base = OTHER; note = 2'-O-methylguanosine-3'-phosphate
  modified_base 13: mod_base = OTHER; note = 2'-O-methylcytidine-3'-phosphate
  modified_base 14: mod_base = OTHER; note = 2'-fluoroadenosine-3'-phosphate
  modified_base 15: mod_base = OTHER; note = 2'-O-methyluridine-3'-phosphate
  modified_base 16: mod_base = OTHER; note = 2'-fluoroguanosine-3'-phosphate
  modified_base 17: mod_base = OTHER; note = 2'-O-methylcytidine-3'-phosphate
  modified_base 18: mod_base = OTHER; note = 2'-O-methylcytidine-3'-phosphate
  modified_base 19: mod_base = OTHER; note = 2'-O-methyladenosine-3'-phosphate
  modified_base 20: mod_base = OTHER; note = 2'-O-methyluridine-3'-phosphate
  modified_base 21: mod_base = OTHER; note = 2'-O-methyladenosine-3'-phosphorothioate
  modified_base 22: mod_base = OTHER; note = 2'-O-methyluridine-3'-phosphorothioate
  modified_base 23: mod_base = OTHER; note = 2'-O-methyladenosine-3'-phosphate
aagctcactgtgcatgccatata

SEQ ID NO: 3432 - RNA, 23 nt, synthetic construct
  source 1..23: mol_type = other RNA
  modified_base 1: mod_base = OTHER; note = 2'-O-methyladenosine-3'-phosphorothioate
  modified_base 2: mod_base = OTHER; note = 2'-fluoroadenosine-3'-phosphorothioate
  modified_base 3: mod_base = OTHER; note = 2'-O-methyluridine-3'-phosphate
  modified_base 4: mod_base = OTHER; note = 2'-O-methyladenosine-3'-phosphate
  modified_base 5: mod_base = OTHER; note = 2'-O-methylguanosine-3'-phosphate
  modified_base 6: mod_base = OTHER; note = 2'-fluorocytidine-3'-phosphate
  modified_base 7: mod_base = OTHER; note = 2'-O-methyluridine-3'-phosphate
  modified_base 8: mod_base = OTHER; note = 2'-fluorocytidine-3'-phosphate
  modified_base 9: mod_base = OTHER; note = 2'-fluoroadenosine-3'-phosphate
  modified_base 10: mod_base = OTHER; note = 2'-O-methylcytidine-3'-phosphate
  modified_base 11: mod_base = OTHER; note = 2'-O-methyluridine-3'-phosphate
  modified_base 12: mod_base = OTHER; note = 2'-O-methylguanosine-3'-phosphate
  modified_base 13: mod_base = OTHER; note = 2'-O-methyluridine-3'-phosphate
  modified_base 14: mod_base = OTHER; note = 2'-fluoroguanosine-3'-phosphate
  modified_base 15: mod_base = OTHER; note = 2'-O-methylcytidine-3'-phosphate
  modified_base 16: mod_base = OTHER; note = 2'-fluoroadenosine-3'-phosphate
  modified_base 17: mod_base = OTHER; note = 2'-O-methyluridine-3'-phosphate
  modified_base 18: mod_base = OTHER; note = 2'-O-methylguanosine-3'-phosphate
  modified_base 19: mod_base = OTHER; note = 2'-O-methylcytidine-3'-phosphate
  modified_base 20: mod_base = OTHER; note = 2'-O-methylcytidine-3'-phosphate
  modified_base 21: mod_base = OTHER; note = 2'-O-methyladenosine-3'-phosphorothioate
  modified_base 22: mod_base = OTHER; note = 2'-O-methyluridine-3'-phosphorothioate
  modified_base 23: mod_base = OTHER; note = 2'-O-methyladenosine-3'-phosphate
aatagctcactgtgcatgccata

SEQ ID NO: 3433 - RNA, 23 nt, synthetic construct
  source 1..23: mol_type = other RNA
  modified_base 1: mod_base = OTHER; note = 2'-O-methyladenosine-3'-phosphorothioate
  modified_base 2: mod_base = OTHER; note = 2'-fluorocytidine-3'-phosphorothioate
  modified_base 3: mod_base = OTHER; note = 2'-O-methyladenosine-3'-phosphate
  modified_base 4: mod_base = OTHER; note = 2'-O-methyluridine-3'-phosphate
  modified_base 5: mod_base = OTHER; note = 2'-O-methyladenosine-3'-phosphate
  modified_base 6: mod_base = OTHER; note = 2'-fluoroguanosine-3'-phosphate
  modified_base 7: mod_base = OTHER; note = 2'-O-methylcytidine-3'-phosphate
  modified_base 8: mod_base = OTHER; note = 2'-fluorouridine-3'-phosphate
  modified_base 9: mod_base = OTHER; note = 2'-fluorocytidine-3'-phosphate
  modified_base 10: mod_base = OTHER; note = 2'-O-methyladenosine-3'-phosphate
  modified_base 11: mod_base = OTHER; note = 2'-O-methylcytidine-3'-phosphate
  modified_base 12: mod_base = OTHER; note = 2'-O-methyluridine-3'-phosphate
  modified_base 13: mod_base = OTHER; note = 2'-O-methylguanosine-3'-phosphate
  modified_base 14: mod_base = OTHER; note = 2'-fluorouridine-3'-phosphate
  modified_base 15: mod_base = OTHER; note = 2'-O-methylguanosine-3'-phosphate
  modified_base 16: mod_base = OTHER; note = 2'-fluorocytidine-3'-phosphate
  modified_base 17: mod_base = OTHER; note = 2'-O-methyladenosine-3'-phosphate
  modified_base 18: mod_base = OTHER; note = 2'-O-methyluridine-3'-phosphate
  modified_base 19: mod_base = OTHER; note = 2'-O-methylguanosine-3'-phosphate
  modified_base 20: mod_base = OTHER; note = 2'-O-methylcytidine-3'-phosphate
  modified_base 21: mod_base = OTHER; note = 2'-O-methylcytidine-3'-phosphorothioate
  modified_base 22: mod_base = OTHER; note = 2'-O-methyladenosine-3'-phosphorothioate
  modified_base 23: mod_base = OTHER; note = 2'-O-methyluridine-3'-phosphate
acatagctcactgtgcatgccat

SEQ ID NO: 3434 - RNA, 23 nt, synthetic construct
  source 1..23: mol_type = other RNA
  modified_base 1: mod_base = OTHER; note = 2'-O-methyladenosine-3'-phosphorothioate
  modified_base 2: mod_base = OTHER; note = 2'-fluoroadenosine-3'-phosphorothioate
  modified_base 3: mod_base = OTHER; note = 2'-O-methylguanosine-3'-phosphate
  modified_base 4: mod_base = OTHER; note = 2'-O-methyladenosine-3'-phosphate
  modified_base 5: mod_base = OTHER; note = 2'-O-methylguanosine-3'-phosphate
  modified_base 6: mod_base = OTHER; note = 2'-fluoroadenosine-3'-phosphate
  modified_base 7: mod_base = OTHER; note = 2'-O-methylguanosine-3'-phosphate
  modified_base 8: mod_base = OTHER; note = 2'-fluoroadenosine-3'-phosphate
  modified_base 9: mod_base = OTHER; note = 2'-fluoroguanosine-3'-phosphate
  modified_base 10: mod_base = OTHER; note = 2'-O-methylguanosine-3'-phosphate
  modified_base 11: mod_base = OTHER; note = 2'-O-methylcytidine-3'-phosphate
  modified_base 12: mod_base = OTHER; note = 2'-O-methylcytidine-3'-phosphate
  modified_base 13: mod_base = OTHER; note = 2'-O-methyladenosine-3'-phosphate
  modified_base 14: mod_base = OTHER; note = 2'-fluoroguanosine-3'-phosphate
  modified_base 15: mod_base = OTHER; note = 2'-O-methylguanosine-3'-phosphate
  modified_base 16: mod_base = OTHER; note = 2'-fluoroguanosine-3'-phosphate
  modified_base 17: mod_base = OTHER; note = 2'-O-methyluridine-3'-phosphate
  modified_base 18: mod_base = OTHER; note = 2'-O-methylguanosine-3'-phosphate
  modified_base 19: mod_base = OTHER; note = 2'-O-methylcytidine-3'-phosphate
  modified_base 20: mod_base = OTHER; note = 2'-O-methylcytidine-3'-phosphate
  modified_base 21: mod_base = OTHER; note = 2'-O-methyladenosine-3'-phosphorothioate
  modified_base 22: mod_base = OTHER; note = 2'-O-methyladenosine-3'-phosphorothioate
  modified_base 23: mod_base = OTHER; note = 2'-O-methyladenosine-3'-phosphate
aagagagaggccagggtgccaaa

SEQ ID NO: 3435 - RNA, 23 nt, synthetic construct
  source 1..23: mol_type = other RNA
  modified_base 1: mod_base = OTHER; note = 2'-O-methyladenosine-3'-phosphorothioate
  modified_base 2: mod_base = OTHER; note = 2'-fluorouridine -3'-phosphorothioate
  modified_base 3: mod_base = OTHER; note = 2'-O-methyladenosine-3'-phosphate
  modified_base 4: mod_base = OTHER; note = 2'-O-methylguanosine-3'-phosphate
  modified_base 5: mod_base = OTHER; note = 2'-O-methyladenosine-3'-phosphate
  modified_base 6: mod_base = OTHER; note = 2'-fluoroguanosine-3'-phosphate
  modified_base 7: mod_base = OTHER; note = 2'-O-methyladenosine-3'-phosphate
  modified_base 8: mod_base = OTHER; note = 2'-fluoroguanosine-3'-phosphate
  modified_base 9: mod_base = OTHER; note = 2'-fluoroadenosine-3'-phosphate
  modified_base 10: mod_base = OTHER; note = 2'-O-methylguanosine-3'-phosphate
  modified_base 11: mod_base = OTHER; note = 2'-O-methylguanosine-3'-phosphate
  modified_base 12: mod_base = OTHER; note = 2'-O-methylcytidine-3'-phosphate
  modified_base 13: mod_base = OTHER; note = 2'-O-methylcytidine-3'-phosphate
  modified_base 14: mod_base = OTHER; note = 2'-fluoroadenosine-3'-phosphate
  modified_base 15: mod_base = OTHER; note = 2'-O-methylguanosine-3'-phosphate
  modified_base 16: mod_base = OTHER; note = 2'-fluoroguanosine-3'-phosphate
  modified_base 17: mod_base = OTHER; note = 2'-O-methylguanosine-3'-phosphate
  modified_base 18: mod_base = OTHER; note = 2'-O-methyluridine-3'-phosphate
  modified_base 19: mod_base = OTHER; note = 2'-O-methylguanosine-3'-phosphate
  modified_base 20: mod_base = OTHER; note = 2'-O-methylcytidine-3'-phosphate
  modified_base 21: mod_base = OTHER; note = 2'-O-methylcytidine-3'-phosphorothioate
  modified_base 22: mod_base = OTHER; note = 2'-O-methyladenosine-3'-phosphorothioate
  modified_base 23: mod_base = OTHER; note = 2'-O-methyladenosine-3'-phosphate
atagagagaggccagggtgccaa

SEQ ID NO: 3436 - RNA, 23 nt, synthetic construct
  source 1..23: mol_type = other RNA
  modified_base 1: mod_base = OTHER; note = 2'-O-methyladenosine-3'-phosphorothioate
  modified_base 2: mod_base = OTHER; note = 2'-fluoroguanosine-3'-phosphorothioate
  modified_base 3: mod_base = OTHER; note = 2'-O-methyluridine-3'-phosphate
  modified_base 4: mod_base = OTHER; note = 2'-O-methyluridine-3'-phosphate
  modified_base 5: mod_base = OTHER; note = 2'-O-methylcytidine-3'-phosphate
  modified_base 6: mod_base = OTHER; note = 2'-fluorouridine-3'-phosphate
  modified_base 7: mod_base = OTHER; note = 2'-O-methyluridine-3'-phosphate
  modified_base 8: mod_base = OTHER; note = 2'-fluoroguanosine-3'-phosphate
  modified_base 9: mod_base = OTHER; note = 2'-fluorouridine-3'-phosphate
  modified_base 10: mod_base = OTHER; note = 2'-O-methylcytidine-3'-phosphate
  modified_base 11: mod_base = OTHER; note = 2'-O-methylcytidine-3'-phosphate
  modified_base 12: mod_base = OTHER; note = 2'-O-methyluridine-3'-phosphate
  modified_base 13: mod_base = OTHER; note = 2'-O-methyluridine-3'-phosphate
  modified_base 14: mod_base = OTHER; note = 2'-fluorocytidine-3'-phosphate
  modified_base 15: mod_base = OTHER; note = 2'-O-methylcytidine-3'-phosphate
  modified_base 16: mod_base = OTHER; note = 2'-fluoroadenosine-3'-phosphate
  modified_base 17: mod_base = OTHER; note = 2'-O-methyladenosine-3'-phosphate
  modified_base 18: mod_base = OTHER; note = 2'-O-methylguanosine-3'-phosphate
  modified_base 19: mod_base = OTHER; note = 2'-O-methylguanosine-3'-phosphate
  modified_base 20: mod_base = OTHER; note = 2'-O-methyladenosine-3'-phosphate
  modified_base 21: mod_base = OTHER; note = 2'-O-methyladenosine-3'-phosphorothioate
  modified_base 22: mod_base = OTHER; note = 2'-O-methylcytidine-3'-phosphorothioate
  modified_base 23: mod_base = OTHER; note = 2'-O-methyladenosine-3'-phosphate
agttcttgtccttccaaggaaca

SEQ ID NO: 3437 - RNA, 23 nt, synthetic construct
  source 1..23: mol_type = other RNA
  modified_base 1: mod_base = OTHER; note = 2'-O-methyladenosine-3'-phosphorothioate
  modified_base 2: mod_base = OTHER; note = 2'-fluoroguanosine-3'-phosphorothioate
  modified_base 3: mod_base = OTHER; note = 2'-O-methylcytidine-3'-phosphate
  modified_base 4: mod_base = OTHER; note = 2'-O-methyladenosine-3'-phosphate
  modified_base 5: mod_base = OTHER; note = 2'-O-methylguanosine-3'-phosphate
  modified_base 6: mod_base = OTHER; note = 2'-fluorouridine-3'-phosphate
  modified_base 7: mod_base = OTHER; note = 2'-O-methyluridine-3'-phosphate
  modified_base 8: mod_base = OTHER; note = 2'-fluorocytidine-3'-phosphate
  modified_base 9: mod_base = OTHER; note = 2'-fluorouridine-3'-phosphate
  modified_base 10: mod_base = OTHER; note = 2'-O-methyluridine-3'-phosphate
  modified_base 11: mod_base = OTHER; note = 2'-O-methylguanosine-3'-phosphate
  modified_base 12: mod_base = OTHER; note = 2'-O-methyluridine-3'-phosphate
  modified_base 13: mod_base = OTHER; note = 2'-O-methylcytidine-3'-phosphate
  modified_base 14: mod_base = OTHER; note = 2'-fluorocytidine-3'-phosphate
  modified_base 15: mod_base = OTHER; note = 2'-O-methyluridine-3'-phosphate
  modified_base 16: mod_base = OTHER; note = 2'-fluorouridine-3'-phosphate
  modified_base 17: mod_base = OTHER; note = 2'-O-methylcytidine-3'-phosphate
  modified_base 18: mod_base = OTHER; note = 2'-O-methylcytidine-3'-phosphate
  modified_base 19: mod_base = OTHER; note = 2'-O-methyladenosine-3'-phosphate
  modified_base 20: mod_base = OTHER; note = 2'-O-methyladenosine-3'-phosphate
  modified_base 21: mod_base = OTHER; note = 2'-O-methylguanosine-3'-phosphorothioate
  modified_base 22: mod_base = OTHER; note = 2'-O-methylguanosine-3'-phosphorothioate
  modified_base 23: mod_base = OTHER; note = 2'-O-methyladenosine-3'-phosphate
agcagttcttgtccttccaagga

SEQ ID NO: 3438 - RNA, 23 nt, synthetic construct
  source 1..23: mol_type = other RNA
  modified_base 1: mod_base = OTHER; note = 2'-O-methyladenosine-3'-phosphorothioate
  modified_base 2: mod_base = OTHER; note = 2'-fluorouridine -3'-phosphorothioate
  modified_base 3: mod_base = OTHER; note = 2'-O-methylguanosine-3'-phosphate
  modified_base 4: mod_base = OTHER; note = 2'-O-methylcytidine-3'-phosphate
  modified_base 5: mod_base = OTHER; note = 2'-O-methyladenosine-3'-phosphate
  modified_base 6: mod_base = OTHER; note = 2'-fluorocytidine-3'-phosphate
  modified_base 7: mod_base = OTHER; note = 2'-O-methyladenosine-3'-phosphate
  modified_base 8: mod_base = OTHER; note = 2'-fluoroadenosine-3'-phosphate
  modified_base 9: mod_base = OTHER; note = 2'-fluoroadenosine-3'-phosphate
  modified_base 10: mod_base = OTHER; note = 2'-O-methylcytidine-3'-phosphate
  modified_base 11: mod_base = OTHER; note = 2'-O-methylguanosine-3'-phosphate
  modified_base 12: mod_base = OTHER; note = 2'-O-methylguanosine-3'-phosphate
  modified_base 13: mod_base = OTHER; note = 2'-O-methylcytidine-3'-phosphate
  modified_base 14: mod_base = OTHER; note = 2'-fluorouridine-3'-phosphate
  modified_base 15: mod_base = OTHER; note = 2'-O-methylguanosine-3'-phosphate
  modified_base 16: mod_base = OTHER; note = 2'-fluorocytidine-3'-phosphate
  modified_base 17: mod_base = OTHER; note = 2'-O-methyluridine-3'-phosphate
  modified_base 18: mod_base = OTHER; note = 2'-O-methyluridine-3'-phosphate
  modified_base 19: mod_base = OTHER; note = 2'-O-methylcytidine-3'-phosphate
  modified_base 20: mod_base = OTHER; note = 2'-O-methyladenosine-3'-phosphate
  modified_base 21: mod_base = OTHER; note = 2'-O-methylguanosine-3'-phosphorothioate
  modified_base 22: mod_base = OTHER; note = 2'-O-methylguanosine-3'-phosphorothioate
  modified_base 23: mod_base = OTHER; note = 2'-O-methyluridine-3'-phosphate
atgcacaaacggctgcttcaggt

SEQ ID NO: 3439 - RNA, 23 nt, synthetic construct
  source 1..23: mol_type = other RNA
  modified_base 1: mod_base = OTHER; note = 2'-O-methyladenosine-3'-phosphorothioate
  modified_base 2: mod_base = OTHER; note = 2'-fluoroadenosine-3'-phosphorothioate
  modified_base 3: mod_base = OTHER; note = 2'-O-methylguanosine-3'-phosphate
  modified_base 4: mod_base = OTHER; note = 2'-O-methyladenosine-3'-phosphate
  modified_base 5: mod_base = OTHER; note = 2'-O-methylguanosine-3'-phosphate
  modified_base 6: mod_base = OTHER; note = 2'-fluorocytidine-3'-phosphate
  modified_base 7: mod_base = OTHER; note = 2'-O-methylcytidine-3'-phosphate
  modified_base 8: mod_base = OTHER; note = 2'-fluoroadenosine-3'-phosphate
  modified_base 9: mod_base = OTHER; note = 2'-fluoroguanosine-3'-phosphate
  modified_base 10: mod_base = OTHER; note = 2'-O-methylguanosine-3'-phosphate
  modified_base 11: mod_base = OTHER; note = 2'-O-methylcytidine-3'-phosphate
  modified_base 12: mod_base = OTHER; note = 2'-O-methylcytidine-3'-phosphate
  modified_base 13: mod_base = OTHER; note = 2'-O-methylcytidine-3'-phosphate
  modified_base 14: mod_base = OTHER; note = 2'-fluorouridine-3'-phosphate
  modified_base 15: mod_base = OTHER; note = 2'-O-methylguanosine-3'-phosphate
  modified_base 16: mod_base = OTHER; note = 2'-fluorocytidine-3'-phosphate
  modified_base 17: mod_base = OTHER; note = 2'-O-methyladenosine-3'-phosphate
  modified_base 18: mod_base = OTHER; note = 2'-O-methylcytidine-3'-phosphate
  modified_base 19: mod_base = OTHER; note = 2'-O-methyladenosine-3'-phosphate
  modified_base 20: mod_base = OTHER; note = 2'-O-methyladenosine-3'-phosphate
  modified_base 21: mod_base = OTHER; note = 2'-O-methyladenosine-3'-phosphorothioate
  modified_base 22: mod_base = OTHER; note = 2'-O-methylcytidine-3'-phosphorothioate
  modified_base 23: mod_base = OTHER; note = 2'-O-methylguanosine-3'-phosphate
aagagccaggccctgcacaaacg

SEQ ID NO: 3440 - RNA, 23 nt, synthetic construct
  source 1..23: mol_type = other RNA
  modified_base 1: mod_base = OTHER; note = 2'-O-methyladenosine-3'-phosphorothioate
  modified_base 2: mod_base = OTHER; note = 2'-fluoroguanosine-3'-phosphorothioate
  modified_base 3: mod_base = OTHER; note = 2'-O-methyladenosine-3'-phosphate
  modified_base 4: mod_base = OTHER; note = 2'-O-methylguanosine-3'-phosphate
  modified_base 5: mod_base = OTHER; note = 2'-O-methyladenosine-3'-phosphate
  modified_base 6: mod_base = OTHER; note = 2'-fluoroguanosine-3'-phosphate
  modified_base 7: mod_base = OTHER; note = 2'-O-methylcytidine-3'-phosphate
  modified_base 8: mod_base = OTHER; note = 2'-fluorocytidine-3'-phosphate
  modified_base 9: mod_base = OTHER; note = 2'-fluoroadenosine-3'-phosphate
  modified_base 10: mod_base = OTHER; note = 2'-O-methylguanosine-3'-phosphate
  modified_base 11: mod_base = OTHER; note = 2'-O-methylguanosine-3'-phosphate
  modified_base 12: mod_base = OTHER; note = 2'-O-methylcytidine-3'-phosphate
  modified_base 13: mod_base = OTHER; note = 2'-O-methylcytidine-3'-phosphate
  modified_base 14: mod_base = OTHER; note = 2'-fluorocytidine-3'-phosphate
  modified_base 15: mod_base = OTHER; note = 2'-O-methyluridine-3'-phosphate
  modified_base 16: mod_base = OTHER; note = 2'-fluoroguanosine-3'-phosphate
  modified_base 17: mod_base = OTHER; note = 2'-O-methylcytidine-3'-phosphate
  modified_base 18: mod_base = OTHER; note = 2'-O-methyladenosine-3'-phosphate
  modified_base 19: mod_base = OTHER; note = 2'-O-methylcytidine-3'-phosphate
  modified_base 20: mod_base = OTHER; note = 2'-O-methyladenosine-3'-phosphate
  modified_base 21: mod_base = OTHER; note = 2'-O-methyladenosine-3'-phosphorothioate
  modified_base 22: mod_base = OTHER; note = 2'-O-methyladenosine-3'-phosphorothioate
  modified_base 23: mod_base = OTHER; note = 2'-O-methylcytidine-3'-phosphate
agagagccaggccctgcacaaac

SEQ ID NO: 3441 - RNA, 23 nt, synthetic construct
  source 1..23: mol_type = other RNA
  modified_base 1: mod_base = OTHER; note = 2'-O-methyladenosine-3'-phosphorothioate
  modified_base 2: mod_base = OTHER; note = 2'-fluoroadenosine-3'-phosphorothioate
  modified_base 3: mod_base = OTHER; note = 2'-O-methylguanosine-3'-phosphate
  modified_base 4: mod_base = OTHER; note = 2'-O-methyladenosine-3'-phosphate
  modified_base 5: mod_base = OTHER; note = 2'-O-methylguanosine-3'-phosphate
  modified_base 6: mod_base = OTHER; note = 2'-fluoroadenosine-3'-phosphate
  modified_base 7: mod_base = OTHER; note = 2'-O-methylguanosine-3'-phosphate
  modified_base 8: mod_base = OTHER; note = 2'-fluorocytidine-3'-phosphate
  modified_base 9: mod_base = OTHER; note = 2'-fluorocytidine-3'-phosphate
  modified_base 10: mod_base = OTHER; note = 2'-O-methyladenosine-3'-phosphate
  modified_base 11: mod_base = OTHER; note = 2'-O-methylguanosine-3'-phosphate
  modified_base 12: mod_base = OTHER; note = 2'-O-methylguanosine-3'-phosphate
  modified_base 13: mod_base = OTHER; note = 2'-O-methylcytidine-3'-phosphate
  modified_base 14: mod_base = OTHER; note = 2'-fluorocytidine-3'-phosphate
  modified_base 15: mod_base = OTHER; note = 2'-O-methylcytidine-3'-phosphate
  modified_base 16: mod_base = OTHER; note = 2'-fluorouridine-3'-phosphate
  modified_base 17: mod_base = OTHER; note = 2'-O-methylguanosine-3'-phosphate
  modified_base 18: mod_base = OTHER; note = 2'-O-methylcytidine-3'-phosphate
  modified_base 19: mod_base = OTHER; note = 2'-O-methyladenosine-3'-phosphate
  modified_base 20: mod_base = OTHER; note = 2'-O-methylcytidine-3'-phosphate
  modified_base 21: mod_base = OTHER; note = 2'-O-methyladenosine-3'-phosphorothioate
  modified_base 22: mod_base = OTHER; note = 2'-O-methyladenosine-3'-phosphorothioate
  modified_base 23: mod_base = OTHER; note = 2'-O-methyladenosine-3'-phosphate
aagagagccaggccctgcacaaa

SEQ ID NO: 3442 - RNA, 23 nt, synthetic construct
  source 1..23: mol_type = other RNA
  modified_base 1: mod_base = OTHER; note = 2'-O-methyladenosine-3'-phosphorothioate
  modified_base 2: mod_base = OTHER; note = 2'-fluorouridine -3'-phosphorothioate
  modified_base 3: mod_base = OTHER; note = 2'-O-methyladenosine-3'-phosphate
  modified_base 4: mod_base = OTHER; note = 2'-O-methylguanosine-3'-phosphate
  modified_base 5: mod_base = OTHER; note = 2'-O-methyladenosine-3'-phosphate
  modified_base 6: mod_base = OTHER; note = 2'-fluoroguanosine-3'-phosphate
  modified_base 7: mod_base = OTHER; note = 2'-O-methyladenosine-3'-phosphate
  modified_base 8: mod_base = OTHER; note = 2'-fluoroguanosine-3'-phosphate
  modified_base 9: mod_base = OTHER; note = 2'-fluorocytidine-3'-phosphate
  modified_base 10: mod_base = OTHER; note = 2'-O-methylcytidine-3'-phosphate
  modified_base 11: mod_base = OTHER; note = 2'-O-methyladenosine-3'-phosphate
  modified_base 12: mod_base = OTHER; note = 2'-O-methylguanosine-3'-phosphate
  modified_base 13: mod_base = OTHER; note = 2'-O-methylguanosine-3'-phosphate
  modified_base 14: mod_base = OTHER; note = 2'-fluorocytidine-3'-phosphate
  modified_base 15: mod_base = OTHER; note = 2'-O-methylcytidine-3'-phosphate
  modified_base 16: mod_base = OTHER; note = 2'-fluorocytidine-3'-phosphate
  modified_base 17: mod_base = OTHER; note = 2'-O-methyluridine-3'-phosphate
  modified_base 18: mod_base = OTHER; note = 2'-O-methylguanosine-3'-phosphate
  modified_base 19: mod_base = OTHER; note = 2'-O-methylcytidine-3'-phosphate
  modified_base 20: mod_base = OTHER; note = 2'-O-methyladenosine-3'-phosphate
  modified_base 21: mod_base = OTHER; note = 2'-O-methylcytidine-3'-phosphorothioate
  modified_base 22: mod_base = OTHER; note = 2'-O-methyladenosine-3'-phosphorothioate
  modified_base 23: mod_base = OTHER; note = 2'-O-methyladenosine-3'-phosphate
atagagagccaggccctgcacaa

SEQ ID NO: 3443 - RNA, 23 nt, synthetic construct
  source 1..23: mol_type = other RNA
  modified_base 1: mod_base = OTHER; note = 2'-O-methyladenosine-3'-phosphorothioate
  modified_base 2: mod_base = OTHER; note = 2'-fluoroadenosine-3'-phosphorothioate
  modified_base 3: mod_base = OTHER; note = 2'-O-methyluridine-3'-phosphate
  modified_base 4: mod_base = OTHER; note = 2'-O-methyladenosine-3'-phosphate
  modified_base 5: mod_base = OTHER; note = 2'-O-methylguanosine-3'-phosphate
  modified_base 6: mod_base = OTHER; note = 2'-fluoroadenosine-3'-phosphate
  modified_base 7: mod_base = OTHER; note = 2'-O-methylguanosine-3'-phosphate
  modified_base 8: mod_base = OTHER; note = 2'-fluoroadenosine-3'-phosphate
  modified_base 9: mod_base = OTHER; note = 2'-fluoroguanosine-3'-phosphate
  modified_base 10: mod_base = OTHER; note = 2'-O-methylcytidine-3'-phosphate
  modified_base 11: mod_base = OTHER; note = 2'-O-methylcytidine-3'-phosphate
  modified_base 12: mod_base = OTHER; note = 2'-O-methyladenosine-3'-phosphate
  modified_base 13: mod_base = OTHER; note = 2'-O-methylguanosine-3'-phosphate
  modified_base 14: mod_base = OTHER; note = 2'-fluoroguanosine-3'-phosphate
  modified_base 15: mod_base = OTHER; note = 2'-O-methylcytidine-3'-phosphate
  modified_base 16: mod_base = OTHER; note = 2'-fluorocytidine-3'-phosphate
  modified_base 17: mod_base = OTHER; note = 2'-O-methylcytidine-3'-phosphate
  modified_base 18: mod_base = OTHER; note = 2'-O-methyluridine-3'-phosphate
  modified_base 19: mod_base = OTHER; note = 2'-O-methylguanosine-3'-phosphate
  modified_base 20: mod_base = OTHER; note = 2'-O-methylcytidine-3'-phosphate
  modified_base 21: mod_base = OTHER; note = 2'-O-methyladenosine-3'-phosphorothioate
  modified_base 22: mod_base = OTHER; note = 2'-O-methylcytidine-3'-phosphorothioate
  modified_base 23: mod_base = OTHER; note = 2'-O-methyladenosine-3'-phosphate
aatagagagccaggccctgcaca

SEQ ID NO: 3444 - RNA, 23 nt, synthetic construct
  source 1..23: mol_type = other RNA
  modified_base 1: mod_base = OTHER; note = 2'-O-methyladenosine-3'-phosphorothioate
  modified_base 2: mod_base = OTHER; note = 2'-fluorocytidine-3'-phosphorothioate
  modified_base 3: mod_base = OTHER; note = 2'-O-methyluridine-3'-phosphate
  modified_base 4: mod_base = OTHER; note = 2'-O-methylguanosine-3'-phosphate
  modified_base 5: mod_base = OTHER; note = 2'-O-methyluridine-3'-phosphate
  modified_base 6: mod_base = OTHER; note = 2'-fluoroguanosine-3'-phosphate
  modified_base 7: mod_base = OTHER; note = 2'-O-methyladenosine-3'-phosphate
  modified_base 8: mod_base = OTHER; note = 2'-fluoroadenosine-3'-phosphate
  modified_base 9: mod_base = OTHER; note = 2'-fluoroguanosine-3'-phosphate
  modified_base 10: mod_base = OTHER; note = 2'-O-methyluridine-3'-phosphate
  modified_base 11: mod_base = OTHER; note = 2'-O-methylcytidine-3'-phosphate
  modified_base 12: mod_base = OTHER; note = 2'-O-methylcytidine-3'-phosphate
  modified_base 13: mod_base = OTHER; note = 2'-O-methyladenosine-3'-phosphate
  modified_base 14: mod_base = OTHER; note = 2'-fluoroguanosine-3'-phosphate
  modified_base 15: mod_base = OTHER; note = 2'-O-methyladenosine-3'-phosphate
  modified_base 16: mod_base = OTHER; note = 2'-fluoroguanosine-3'-phosphate
  modified_base 17: mod_base = OTHER; note = 2'-O-methyladenosine-3'-phosphate
  modified_base 18: mod_base = OTHER; note = 2'-O-methylguanosine-3'-phosphate
  modified_base 19: mod_base = OTHER; note = 2'-O-methylcytidine-3'-phosphate
  modified_base 20: mod_base = OTHER; note = 2'-O-methylguanosine-3'-phosphate
  modified_base 21: mod_base = OTHER; note = 2'-O-methyluridine-3'-phosphorothioate
  modified_base 22: mod_base = OTHER; note = 2'-O-methylguanosine-3'-phosphorothioate
  modified_base 23: mod_base = OTHER; note = 2'-O-methylguanosine-3'-phosphate
actgtgaagtccagagagcgtgg

SEQ ID NO: 3445 - RNA, 23 nt, synthetic construct
  source 1..23: mol_type = other RNA
  modified_base 1: mod_base = OTHER; note = 2'-O-methyladenosine-3'-phosphorothioate
  modified_base 2: mod_base = OTHER; note = 2'-fluorouridine -3'-phosphorothioate
  modified_base 3: mod_base = OTHER; note = 2'-O-methylcytidine-3'-phosphate
  modified_base 4: mod_base = OTHER; note = 2'-O-methyluridine-3'-phosphate
  modified_base 5: mod_base = OTHER; note = 2'-O-methylguanosine-3'-phosphate
  modified_base 6: mod_base = OTHER; note = 2'-fluorouridine-3'-phosphate
  modified_base 7: mod_base = OTHER; note = 2'-O-methylguanosine-3'-phosphate
  modified_base 8: mod_base = OTHER; note = 2'-fluoroadenosine-3'-phosphate
  modified_base 9: mod_base = OTHER; note = 2'-fluoroadenosine-3'-phosphate
  modified_base 10: mod_base = OTHER; note = 2'-O-methylguanosine-3'-phosphate
  modified_base 11: mod_base = OTHER; note = 2'-O-methyluridine-3'-phosphate
  modified_base 12: mod_base = OTHER; note = 2'-O-methylcytidine-3'-phosphate
  modified_base 13: mod_base = OTHER; note = 2'-O-methylcytidine-3'-phosphate
  modified_base 14: mod_base = OTHER; note = 2'-fluoroadenosine-3'-phosphate
  modified_base 15: mod_base = OTHER; note = 2'-O-methylguanosine-3'-phosphate
  modified_base 16: mod_base = OTHER; note = 2'-fluoroadenosine-3'-phosphate
  modified_base 17: mod_base = OTHER; note = 2'-O-methylguanosine-3'-phosphate
  modified_base 18: mod_base = OTHER; note = 2'-O-methyladenosine-3'-phosphate
  modified_base 19: mod_base = OTHER; note = 2'-O-methylguanosine-3'-phosphate
  modified_base 20: mod_base = OTHER; note = 2'-O-methylcytidine-3'-phosphate
  modified_base 21: mod_base = OTHER; note = 2'-O-methylguanosine-3'-phosphorothioate
  modified_base 22: mod_base = OTHER; note = 2'-O-methyluridine-3'-phosphorothioate
  modified_base 23: mod_base = OTHER; note = 2'-O-methylguanosine-3'-phosphate
atctgtgaagtccagagagcgtg

SEQ ID NO: 3446 - RNA, 23 nt, synthetic construct
  source 1..23: mol_type = other RNA
  modified_base 1: mod_base = OTHER; note = 2'-O-methyladenosine-3'-phosphorothioate
  modified_base 2: mod_base = OTHER; note = 2'-fluoroguanosine-3'-phosphorothioate
  modified_base 3: mod_base = OTHER; note = 2'-O-methyladenosine-3'-phosphate
  modified_base 4: mod_base = OTHER; note = 2'-O-methyladenosine-3'-phosphate
  modified_base 5: mod_base = OTHER; note = 2'-O-methylcytidine-3'-phosphate
  modified_base 6: mod_base = OTHER; note = 2'-fluorocytidine-3'-phosphate
  modified_base 7: mod_base = OTHER; note = 2'-O-methyluridine-3'-phosphate
  modified_base 8: mod_base = OTHER; note = 2'-fluoroguanosine-3'-phosphate
  modified_base 9: mod_base = OTHER; note = 2'-fluorouridine-3'-phosphate
  modified_base 10: mod_base = OTHER; note = 2'-O-methylcytidine-3'-phosphate
  modified_base 11: mod_base = OTHER; note = 2'-O-methyladenosine-3'-phosphate
  modified_base 12: mod_base = OTHER; note = 2'-O-methyladenosine-3'-phosphate
  modified_base 13: mod_base = OTHER; note = 2'-O-methyluridine-3'-phosphate
  modified_base 14: mod_base = OTHER; note = 2'-fluorocytidine-3'-phosphate
  modified_base 15: mod_base = OTHER; note = 2'-O-methyluridine-3'-phosphate
  modified_base 16: mod_base = OTHER; note = 2'-fluorouridine-3'-phosphate
  modified_base 17: mod_base = OTHER; note = 2'-O-methylcytidine-3'-phosphate
  modified_base 18: mod_base = OTHER; note = 2'-O-methyluridine-3'-phosphate
  modified_base 19: mod_base = OTHER; note = 2'-O-methylcytidine-3'-phosphate
  modified_base 20: mod_base = OTHER; note = 2'-O-methyladenosine-3'-phosphate
  modified_base 21: mod_base = OTHER; note = 2'-O-methylguanosine-3'-phosphorothioate
  modified_base 22: mod_base = OTHER; note = 2'-O-methylcytidine-3'-phosphorothioate
  modified_base 23: mod_base = OTHER; note = 2'-O-methyladenosine-3'-phosphate
agaacctgtcaatcttctcagca

SEQ ID NO: 3447 - RNA, 23 nt, synthetic construct
  source 1..23: mol_type = other RNA
  modified_base 1: mod_base = OTHER; note = 2'-O-methyladenosine-3'-phosphorothioate
  modified_base 2: mod_base = OTHER; note = 2'-fluoroadenosine-3'-phosphorothioate
  modified_base 3: mod_base = OTHER; note = 2'-O-methyluridine-3'-phosphate
  modified_base 4: mod_base = OTHER; note = 2'-O-methylguanosine-3'-phosphate
  modified_base 5: mod_base = OTHER; note = 2'-O-methyladenosine-3'-phosphate
  modified_base 6: mod_base = OTHER; note = 2'-fluoroadenosine-3'-phosphate
  modified_base 7: mod_base = OTHER; note = 2'-O-methylcytidine-3'-phosphate
  modified_base 8: mod_base = OTHER; note = 2'-fluorocytidine-3'-phosphate
  modified_base 9: mod_base = OTHER; note = 2'-fluorouridine-3'-phosphate
  modified_base 10: mod_base = OTHER; note = 2'-O-methylguanosine-3'-phosphate
  modified_base 11: mod_base = OTHER; note = 2'-O-methyluridine-3'-phosphate
  modified_base 12: mod_base = OTHER; note = 2'-O-methylcytidine-3'-phosphate
  modified_base 13: mod_base = OTHER; note = 2'-O-methyladenosine-3'-phosphate
  modified_base 14: mod_base = OTHER; note = 2'-fluoroadenosine-3'-phosphate
  modified_base 15: mod_base = OTHER; note = 2'-O-methyluridine-3'-phosphate
  modified_base 16: mod_base = OTHER; note = 2'-fluorocytidine-3'-phosphate
  modified_base 17: mod_base = OTHER; note = 2'-O-methyluridine-3'-phosphate
  modified_base 18: mod_base = OTHER; note = 2'-O-methyluridine-3'-phosphate
  modified_base 19: mod_base = OTHER; note = 2'-O-methylcytidine-3'-phosphate
  modified_base 20: mod_base = OTHER; note = 2'-O-methyluridine-3'-phosphate
  modified_base 21: mod_base = OTHER; note = 2'-O-methylcytidine-3'-phosphorothioate
  modified_base 22: mod_base = OTHER; note = 2'-O-methyladenosine-3'-phosphorothioate
  modified_base 23: mod_base = OTHER; note = 2'-O-methylguanosine-3'-phosphate
aatgaacctgtcaatcttctcag

SEQ ID NO: 3448 - RNA, 23 nt, synthetic construct
  source 1..23: mol_type = other RNA
  modified_base 1: mod_base = OTHER; note = 2'-O-methyladenosine-3'-phosphorothioate
  modified_base 2: mod_base = OTHER; note = 2'-fluorocytidine-3'-phosphorothioate
  modified_base 3: mod_base = OTHER; note = 2'-O-methyladenosine-3'-phosphate
  modified_base 4: mod_base = OTHER; note = 2'-O-methyluridine-3'-phosphate
  modified_base 5: mod_base = OTHER; note = 2'-O-methylguanosine-3'-phosphate
  modified_base 6: mod_base = OTHER; note = 2'-fluoroadenosine-3'-phosphate
  modified_base 7: mod_base = OTHER; note = 2'-O-methyladenosine-3'-phosphate
  modified_base 8: mod_base = OTHER; note = 2'-fluorocytidine-3'-phosphate
  modified_base 9: mod_base = OTHER; note = 2'-fluorocytidine-3'-phosphate
  modified_base 10: mod_base = OTHER; note = 2'-O-methyluridine-3'-phosphate
  modified_base 11: mod_base = OTHER; note = 2'-O-methylguanosine-3'-phosphate
  modified_base 12: mod_base = OTHER; note = 2'-O-methyluridine-3'-phosphate
  modified_base 13: mod_base = OTHER; note = 2'-O-methylcytidine-3'-phosphate
  modified_base 14: mod_base = OTHER; note = 2'-fluoroadenosine-3'-phosphate
  modified_base 15: mod_base = OTHER; note = 2'-O-methyladenosine-3'-phosphate
  modified_base 16: mod_base = OTHER; note = 2'-fluorouridine-3'-phosphate
  modified_base 17: mod_base = OTHER; note = 2'-O-methylcytidine-3'-phosphate
  modified_base 18: mod_base = OTHER; note = 2'-O-methyluridine-3'-phosphate
  modified_base 19: mod_base = OTHER; note = 2'-O-methyluridine-3'-phosphate
  modified_base 20: mod_base = OTHER; note = 2'-O-methylcytidine-3'-phosphate
  modified_base 21: mod_base = OTHER; note = 2'-O-methyluridine-3'-phosphorothioate
  modified_base 22: mod_base = OTHER; note = 2'-O-methylcytidine-3'-phosphorothioate
  modified_base 23: mod_base = OTHER; note = 2'-O-methyladenosine-3'-phosphate
acatgaacctgtcaatcttctca

SEQ ID NO: 3449 - RNA, 23 nt, synthetic construct
  source 1..23: mol_type = other RNA
  modified_base 1: mod_base = OTHER; note = 2'-O-methyladenosine-3'-phosphorothioate
  modified_base 2: mod_base = OTHER; note = 2'-fluoroguanosine-3'-phosphorothioate
  modified_base 3: mod_base = OTHER; note = 2'-O-methylcytidine-3'-phosphate
  modified_base 4: mod_base = OTHER; note = 2'-O-methyladenosine-3'-phosphate
  modified_base 5: mod_base = OTHER; note = 2'-O-methyluridine-3'-phosphate
  modified_base 6: mod_base = OTHER; note = 2'-fluoroguanosine-3'-phosphate
  modified_base 7: mod_base = OTHER; note = 2'-O-methyladenosine-3'-phosphate
  modified_base 8: mod_base = OTHER; note = 2'-fluoroadenosine-3'-phosphate
  modified_base 9: mod_base = OTHER; note = 2'-fluorocytidine-3'-phosphate
  modified_base 10: mod_base = OTHER; note = 2'-O-methylcytidine-3'-phosphate
  modified_base 11: mod_base = OTHER; note = 2'-O-methyluridine-3'-phosphate
  modified_base 12: mod_base = OTHER; note = 2'-O-methylguanosine-3'-phosphate
  modified_base 13: mod_base = OTHER; note = 2'-O-methyluridine-3'-phosphate
  modified_base 14: mod_base = OTHER; note = 2'-fluorocytidine-3'-phosphate
  modified_base 15: mod_base = OTHER; note = 2'-O-methyladenosine-3'-phosphate
  modified_base 16: mod_base = OTHER; note = 2'-fluoroadenosine-3'-phosphate
  modified_base 17: mod_base = OTHER; note = 2'-O-methyluridine-3'-phosphate
  modified_base 18: mod_base = OTHER; note = 2'-O-methylcytidine-3'-phosphate
  modified_base 19: mod_base = OTHER; note = 2'-O-methyluridine-3'-phosphate
  modified_base 20: mod_base = OTHER; note = 2'-O-methyluridine-3'-phosphate
  modified_base 21: mod_base = OTHER; note = 2'-O-methylcytidine-3'-phosphorothioate
  modified_base 22: mod_base = OTHER; note = 2'-O-methyluridine-3'-phosphorothioate
  modified_base 23: mod_base = OTHER; note = 2'-O-methylcytidine-3'-phosphate
agcatgaacctgtcaatcttctc

SEQ ID NO: 3450 - RNA, 23 nt, synthetic construct
  source 1..23: mol_type = other RNA
  modified_base 1: mod_base = OTHER; note = 2'-O-methyladenosine-3'-phosphorothioate
  modified_base 2: mod_base = OTHER; note = 2'-fluorouridine -3'-phosphorothioate
  modified_base 3: mod_base = OTHER; note = 2'-O-methylguanosine-3'-phosphate
  modified_base 4: mod_base = OTHER; note = 2'-O-methylcytidine-3'-phosphate
  modified_base 5: mod_base = OTHER; note = 2'-O-methyladenosine-3'-phosphate
  modified_base 6: mod_base = OTHER; note = 2'-fluorouridine-3'-phosphate
  modified_base 7: mod_base = OTHER; note = 2'-O-methylguanosine-3'-phosphate
  modified_base 8: mod_base = OTHER; note = 2'-fluoroadenosine-3'-phosphate
  modified_base 9: mod_base = OTHER; note = 2'-fluoroadenosine-3'-phosphate
  modified_base 10: mod_base = OTHER; note = 2'-O-methylcytidine-3'-phosphate
  modified_base 11: mod_base = OTHER; note = 2'-O-methylcytidine-3'-phosphate
  modified_base 12: mod_base = OTHER; note = 2'-O-methyluridine-3'-phosphate
  modified_base 13: mod_base = OTHER; note = 2'-O-methylguanosine-3'-phosphate
  modified_base 14: mod_base = OTHER; note = 2'-fluorouridine-3'-phosphate
  modified_base 15: mod_base = OTHER; note = 2'-O-methylcytidine-3'-phosphate
  modified_base 16: mod_base = OTHER; note = 2'-fluoroadenosine-3'-phosphate
  modified_base 17: mod_base = OTHER; note = 2'-O-methyladenosine-3'-phosphate
  modified_base 18: mod_base = OTHER; note = 2'-O-methyluridine-3'-phosphate
  modified_base 19: mod_base = OTHER; note = 2'-O-methylcytidine-3'-phosphate
  modified_base 20: mod_base = OTHER; note = 2'-O-methyluridine-3'-phosphate
  modified_base 21: mod_base = OTHER; note = 2'-O-methyluridine-3'-phosphorothioate
  modified_base 22: mod_base = OTHER; note = 2'-O-methylcytidine-3'-phosphorothioate
  modified_base 23: mod_base = OTHER; note = 2'-O-methyluridine-3'-phosphate
atgcatgaacctgtcaatcttct

SEQ ID NO: 3451 - RNA, 23 nt, synthetic construct
  source 1..23: mol_type = other RNA
  modified_base 1: mod_base = OTHER; note = 2'-O-methyladenosine-3'-phosphorothioate
  modified_base 2: mod_base = OTHER; note = 2'-fluorocytidine-3'-phosphorothioate
  modified_base 3: mod_base = OTHER; note = 2'-O-methyluridine-3'-phosphate
  modified_base 4: mod_base = OTHER; note = 2'-O-methylguanosine-3'-phosphate
  modified_base 5: mod_base = OTHER; note = 2'-O-methylcytidine-3'-phosphate
  modified_base 6: mod_base = OTHER; note = 2'-fluoroadenosine-3'-phosphate
  modified_base 7: mod_base = OTHER; note = 2'-O-methyluridine-3'-phosphate
  modified_base 8: mod_base = OTHER; note = 2'-fluoroguanosine-3'-phosphate
  modified_base 9: mod_base = OTHER; note = 2'-fluoroadenosine-3'-phosphate
  modified_base 10: mod_base = OTHER; note = 2'-O-methyladenosine-3'-phosphate
  modified_base 11: mod_base = OTHER; note = 2'-O-methylcytidine-3'-phosphate
  modified_base 12: mod_base = OTHER; note = 2'-O-methylcytidine-3'-phosphate
  modified_base 13: mod_base = OTHER; note = 2'-O-methyluridine-3'-phosphate
  modified_base 14: mod_base = OTHER; note = 2'-fluoroguanosine-3'-phosphate
  modified_base 15: mod_base = OTHER; note = 2'-O-methyluridine-3'-phosphate
  modified_base 16: mod_base = OTHER; note = 2'-fluorocytidine-3'-phosphate
  modified_base 17: mod_base = OTHER; note = 2'-O-methyladenosine-3'-phosphate
  modified_base 18: mod_base = OTHER; note = 2'-O-methyladenosine-3'-phosphate
  modified_base 19: mod_base = OTHER; note = 2'-O-methyluridine-3'-phosphate
  modified_base 20: mod_base = OTHER; note = 2'-O-methylcytidine-3'-phosphate
  modified_base 21: mod_base = OTHER; note = 2'-O-methyluridine-3'-phosphorothioate
  modified_base 22: mod_base = OTHER; note = 2'-O-methyluridine-3'-phosphorothioate
  modified_base 23: mod_base = OTHER; note = 2'-O-methylcytidine-3'-phosphate
actgcatgaacctgtcaatcttc

SEQ ID NO: 3452 - RNA, 23 nt, synthetic construct
  source 1..23: mol_type = other RNA
  modified_base 1: mod_base = OTHER; note = 2'-O-methyladenosine-3'-phosphorothioate
  modified_base 2: mod_base = OTHER; note = 2'-fluorocytidine-3'-phosphorothioate
  modified_base 3: mod_base = OTHER; note = 2'-O-methylcytidine-3'-phosphate
  modified_base 4: mod_base = OTHER; note = 2'-O-methyluridine-3'-phosphate
  modified_base 5: mod_base = OTHER; note = 2'-O-methylguanosine-3'-phosphate
  modified_base 6: mod_base = OTHER; note = 2'-fluorocytidine-3'-phosphate
  modified_base 7: mod_base = OTHER; note = 2'-O-methyladenosine-3'-phosphate
  modified_base 8: mod_base = OTHER; note = 2'-fluorouridine-3'-phosphate
  modified_base 9: mod_base = OTHER; note = 2'-fluoroguanosine-3'-phosphate
  modified_base 10: mod_base = OTHER; note = 2'-O-methyladenosine-3'-phosphate
  modified_base 11: mod_base = OTHER; note = 2'-O-methyladenosine-3'-phosphate
  modified_base 12: mod_base = OTHER; note = 2'-O-methylcytidine-3'-phosphate
  modified_base 13: mod_base = OTHER; note = 2'-O-methylcytidine-3'-phosphate
  modified_base 14: mod_base = OTHER; note = 2'-fluorouridine-3'-phosphate
  modified_base 15: mod_base = OTHER; note = 2'-O-methylguanosine-3'-phosphate
  modified_base 16: mod_base = OTHER; note = 2'-fluorouridine-3'-phosphate
  modified_base 17: mod_base = OTHER; note = 2'-O-methylcytidine-3'-phosphate
  modified_base 18: mod_base = OTHER; note = 2'-O-methyladenosine-3'-phosphate
  modified_base 19: mod_base = OTHER; note = 2'-O-methyladenosine-3'-phosphate
  modified_base 20: mod_base = OTHER; note = 2'-O-methyluridine-3'-phosphate
  modified_base 21: mod_base = OTHER; note = 2'-O-methylcytidine-3'-phosphorothioate
  modified_base 22: mod_base = OTHER; note = 2'-O-methyluridine-3'-phosphorothioate
  modified_base 23: mod_base = OTHER; note = 2'-O-methyluridine-3'-phosphate
acctgcatgaacctgtcaatctt

SEQ ID NO: 3453 - RNA, 23 nt, synthetic construct
  source 1..23: mol_type = other RNA
  modified_base 1: mod_base = OTHER; note = 2'-O-methyladenosine-3'-phosphorothioate
  modified_base 2: mod_base = OTHER; note = 2'-fluoroguanosine-3'-phosphorothioate
  modified_base 3: mod_base = OTHER; note = 2'-O-methylcytidine-3'-phosphate
  modified_base 4: mod_base = OTHER; note = 2'-O-methylcytidine-3'-phosphate
  modified_base 5: mod_base = OTHER; note = 2'-O-methyluridine-3'-phosphate
  modified_base 6: mod_base = OTHER; note = 2'-fluoroguanosine-3'-phosphate
  modified_base 7: mod_base = OTHER; note = 2'-O-methylcytidine-3'-phosphate
  modified_base 8: mod_base = OTHER; note = 2'-fluoroadenosine-3'-phosphate
  modified_base 9: mod_base = OTHER; note = 2'-fluorouridine-3'-phosphate
  modified_base 10: mod_base = OTHER; note = 2'-O-methylguanosine-3'-phosphate
  modified_base 11: mod_base = OTHER; note = 2'-O-methyladenosine-3'-phosphate
  modified_base 12: mod_base = OTHER; note = 2'-O-methyladenosine-3'-phosphate
  modified_base 13: mod_base = OTHER; note = 2'-O-methylcytidine-3'-phosphate
  modified_base 14: mod_base = OTHER; note = 2'-fluorocytidine-3'-phosphate
  modified_base 15: mod_base = OTHER; note = 2'-O-methyluridine-3'-phosphate
  modified_base 16: mod_base = OTHER; note = 2'-fluoroguanosine-3'-phosphate
  modified_base 17: mod_base = OTHER; note = 2'-O-methyluridine-3'-phosphate
  modified_base 18: mod_base = OTHER; note = 2'-O-methylcytidine-3'-phosphate
  modified_base 19: mod_base = OTHER; note = 2'-O-methyladenosine-3'-phosphate
  modified_base 20: mod_base = OTHER; note = 2'-O-methyladenosine-3'-phosphate
  modified_base 21: mod_base = OTHER; note = 2'-O-methyluridine-3'-phosphorothioate
  modified_base 22: mod_base = OTHER; note = 2'-O-methylcytidine-3'-phosphorothioate
  modified_base 23: mod_base = OTHER; note = 2'-O-methyluridine-3'-phosphate
agcctgcatgaacctgtcaatct

SEQ ID NO: 3454 - RNA, 23 nt, synthetic construct
  source 1..23: mol_type = other RNA
  modified_base 1: mod_base = OTHER; note = 2'-O-methyladenosine-3'-phosphorothioate
  modified_base 2: mod_base = OTHER; note = 2'-fluoroadenosine-3'-phosphorothioate
  modified_base 3: mod_base = OTHER; note = 2'-O-methylguanosine-3'-phosphate
  modified_base 4: mod_base = OTHER; note = 2'-O-methylcytidine-3'-phosphate
  modified_base 5: mod_base = OTHER; note = 2'-O-methylcytidine-3'-phosphate
  modified_base 6: mod_base = OTHER; note = 2'-fluorouridine-3'-phosphate
  modified_base 7: mod_base = OTHER; note = 2'-O-methylguanosine-3'-phosphate
  modified_base 8: mod_base = OTHER; note = 2'-fluorocytidine-3'-phosphate
  modified_base 9: mod_base = OTHER; note = 2'-fluoroadenosine-3'-phosphate
  modified_base 10: mod_base = OTHER; note = 2'-O-methyluridine-3'-phosphate
  modified_base 11: mod_base = OTHER; note = 2'-O-methylguanosine-3'-phosphate
  modified_base 12: mod_base = OTHER; note = 2'-O-methyladenosine-3'-phosphate
  modified_base 13: mod_base = OTHER; note = 2'-O-methyladenosine-3'-phosphate
  modified_base 14: mod_base = OTHER; note = 2'-fluorocytidine-3'-phosphate
  modified_base 15: mod_base = OTHER; note = 2'-O-methylcytidine-3'-phosphate
  modified_base 16: mod_base = OTHER; note = 2'-fluorouridine-3'-phosphate
  modified_base 17: mod_base = OTHER; note = 2'-O-methylguanosine-3'-phosphate
  modified_base 18: mod_base = OTHER; note = 2'-O-methyluridine-3'-phosphate
  modified_base 19: mod_base = OTHER; note = 2'-O-methylcytidine-3'-phosphate
  modified_base 20: mod_base = OTHER; note = 2'-O-methyladenosine-3'-phosphate
  modified_base 21: mod_base = OTHER; note = 2'-O-methyladenosine-3'-phosphorothioate
  modified_base 22: mod_base = OTHER; note = 2'-O-methyluridine-3'-phosphorothioate
  modified_base 23: mod_base = OTHER; note = 2'-O-methylcytidine-3'-phosphate
aagcctgcatgaacctgtcaatc

SEQ ID NO: 3455 - RNA, 23 nt, synthetic construct
  source 1..23: mol_type = other RNA
  modified_base 1: mod_base = OTHER; note = 2'-O-methyladenosine-3'-phosphorothioate
  modified_base 2: mod_base = OTHER; note = 2'-fluorocytidine-3'-phosphorothioate
  modified_base 3: mod_base = OTHER; note = 2'-O-methyladenosine-3'-phosphate
  modified_base 4: mod_base = OTHER; note = 2'-O-methylguanosine-3'-phosphate
  modified_base 5: mod_base = OTHER; note = 2'-O-methylcytidine-3'-phosphate
  modified_base 6: mod_base = OTHER; note = 2'-fluorocytidine-3'-phosphate
  modified_base 7: mod_base = OTHER; note = 2'-O-methyluridine-3'-phosphate
  modified_base 8: mod_base = OTHER; note = 2'-fluoroguanosine-3'-phosphate
  modified_base 9: mod_base = OTHER; note = 2'-fluorocytidine-3'-phosphate
  modified_base 10: mod_base = OTHER; note = 2'-O-methyladenosine-3'-phosphate
  modified_base 11: mod_base = OTHER; note = 2'-O-methyluridine-3'-phosphate
  modified_base 12: mod_base = OTHER; note = 2'-O-methylguanosine-3'-phosphate
  modified_base 13: mod_base = OTHER; note = 2'-O-methyladenosine-3'-phosphate
  modified_base 14: mod_base = OTHER; note = 2'-fluoroadenosine-3'-phosphate
  modified_base 15: mod_base = OTHER; note = 2'-O-methylcytidine-3'-phosphate
  modified_base 16: mod_base = OTHER; note = 2'-fluorocytidine-3'-phosphate
  modified_base 17: mod_base = OTHER; note = 2'-O-methyluridine-3'-phosphate
  modified_base 18: mod_base = OTHER; note = 2'-O-methylguanosine-3'-phosphate
  modified_base 19: mod_base = OTHER; note = 2'-O-methyluridine-3'-phosphate
  modified_base 20: mod_base = OTHER; note = 2'-O-methylcytidine-3'-phosphate
  modified_base 21: mod_base = OTHER; note = 2'-O-methyladenosine-3'-phosphorothioate
  modified_base 22: mod_base = OTHER; note = 2'-O-methyladenosine-3'-phosphorothioate
  modified_base 23: mod_base = OTHER; note = 2'-O-methyluridine-3'-phosphate
acagcctgcatgaacctgtcaat

SEQ ID NO: 3456 - RNA, 23 nt, synthetic construct
  source 1..23: mol_type = other RNA
  modified_base 1: mod_base = OTHER; note = 2'-O-methyladenosine-3'-phosphorothioate
  modified_base 2: mod_base = OTHER; note = 2'-fluoroadenosine-3'-phosphorothioate
  modified_base 3: mod_base = OTHER; note = 2'-O-methylcytidine-3'-phosphate
  modified_base 4: mod_base = OTHER; note = 2'-O-methyladenosine-3'-phosphate
  modified_base 5: mod_base = OTHER; note = 2'-O-methylguanosine-3'-phosphate
  modified_base 6: mod_base = OTHER; note = 2'-fluorocytidine-3'-phosphate
  modified_base 7: mod_base = OTHER; note = 2'-O-methylcytidine-3'-phosphate
  modified_base 8: mod_base = OTHER; note = 2'-fluorouridine-3'-phosphate
  modified_base 9: mod_base = OTHER; note = 2'-fluoroguanosine-3'-phosphate
  modified_base 10: mod_base = OTHER; note = 2'-O-methylcytidine-3'-phosphate
  modified_base 11: mod_base = OTHER; note = 2'-O-methyladenosine-3'-phosphate
  modified_base 12: mod_base = OTHER; note = 2'-O-methyluridine-3'-phosphate
  modified_base 13: mod_base = OTHER; note = 2'-O-methylguanosine-3'-phosphate
  modified_base 14: mod_base = OTHER; note = 2'-fluoroadenosine-3'-phosphate
  modified_base 15: mod_base = OTHER; note = 2'-O-methyladenosine-3'-phosphate
  modified_base 16: mod_base = OTHER; note = 2'-fluorocytidine-3'-phosphate
  modified_base 17: mod_base = OTHER; note = 2'-O-methylcytidine-3'-phosphate
  modified_base 18: mod_base = OTHER; note = 2'-O-methyluridine-3'-phosphate
  modified_base 19: mod_base = OTHER; note = 2'-O-methylguanosine-3'-phosphate
  modified_base 20: mod_base = OTHER; note = 2'-O-methyluridine-3'-phosphate
  modified_base 21: mod_base = OTHER; note = 2'-O-methylcytidine-3'-phosphorothioate
  modified_base 22: mod_base = OTHER; note = 2'-O-methyladenosine-3'-phosphorothioate
  modified_base 23: mod_base = OTHER; note = 2'-O-methyladenosine-3'-phosphate
aacagcctgcatgaacctgtcaa

SEQ ID NO: 3457 - RNA, 23 nt, synthetic construct
  source 1..23: mol_type = other RNA
  modified_base 1: mod_base = OTHER; note = 2'-O-methyladenosine-3'-phosphorothioate
  modified_base 2: mod_base = OTHER; note = 2'-fluorouridine -3'-phosphorothioate
  modified_base 3: mod_base = OTHER; note = 2'-O-methyluridine-3'-phosphate
  modified_base 4: mod_base = OTHER; note = 2'-O-methylcytidine-3'-phosphate
  modified_base 5: mod_base = OTHER; note = 2'-O-methylcytidine-3'-phosphate
  modified_base 6: mod_base = OTHER; note = 2'-fluoroadenosine-3'-phosphate
  modified_base 7: mod_base = OTHER; note = 2'-O-methyluridine-3'-phosphate
  modified_base 8: mod_base = OTHER; note = 2'-fluorocytidine-3'-phosphate
  modified_base 9: mod_base = OTHER; note = 2'-fluorocytidine-3'-phosphate
  modified_base 10: mod_base = OTHER; note = 2'-O-methyluridine-3'-phosphate
  modified_base 11: mod_base = OTHER; note = 2'-O-methylguanosine-3'-phosphate
  modified_base 12: mod_base = OTHER; note = 2'-O-methyluridine-3'-phosphate
  modified_base 13: mod_base = OTHER; note = 2'-O-methylcytidine-3'-phosphate
  modified_base 14: mod_base = OTHER; note = 2'-fluoroadenosine-3'-phosphate
  modified_base 15: mod_base = OTHER; note = 2'-O-methylcytidine-3'-phosphate
  modified_base 16: mod_base = OTHER; note = 2'-fluoroadenosine-3'-phosphate
  modified_base 17: mod_base = OTHER; note = 2'-O-methylguanosine-3'-phosphate
  modified_base 18: mod_base = OTHER; note = 2'-O-methylcytidine-3'-phosphate
  modified_base 19: mod_base = OTHER; note = 2'-O-methylcytidine-3'-phosphate
  modified_base 20: mod_base = OTHER; note = 2'-O-methyluridine-3'-phosphate
  modified_base 21: mod_base = OTHER; note = 2'-O-methylguanosine-3'-phosphorothioate
  modified_base 22: mod_base = OTHER; note = 2'-O-methylcytidine-3'-phosphorothioate
  modified_base 23: mod_base = OTHER; note = 2'-O-methyladenosine-3'-phosphate
attccatcctgtcacagcctgca

SEQ ID NO: 3458 - RNA, 23 nt, synthetic construct
  source 1..23: mol_type = other RNA
  modified_base 1: mod_base = OTHER; note = 2'-O-methyladenosine-3'-phosphorothioate
  modified_base 2: mod_base = OTHER; note = 2'-fluorocytidine-3'-phosphorothioate
  modified_base 3: mod_base = OTHER; note = 2'-O-methyluridine-3'-phosphate
  modified_base 4: mod_base = OTHER; note = 2'-O-methylguanosine-3'-phosphate
  modified_base 5: mod_base = OTHER; note = 2'-O-methyluridine-3'-phosphate
  modified_base 6: mod_base = OTHER; note = 2'-fluorouridine-3'-phosphate
  modified_base 7: mod_base = OTHER; note = 2'-O-methylguanosine-3'-phosphate
  modified_base 8: mod_base = OTHER; note = 2'-fluorouridine-3'-phosphate
  modified_base 9: mod_base = OTHER; note = 2'-fluorocytidine-3'-phosphate
  modified_base 10: mod_base = OTHER; note = 2'-O-methylcytidine-3'-phosphate
  modified_base 11: mod_base = OTHER; note = 2'-O-methyladenosine-3'-phosphate
  modified_base 12: mod_base = OTHER; note = 2'-O-methylcytidine-3'-phosphate
  modified_base 13: mod_base = OTHER; note = 2'-O-methylcytidine-3'-phosphate
  modified_base 14: mod_base = OTHER; note = 2'-fluorocytidine-3'-phosphate
  modified_base 15: mod_base = OTHER; note = 2'-O-methyladenosine-3'-phosphate
  modified_base 16: mod_base = OTHER; note = 2'-fluoroguanosine-3'-phosphate
  modified_base 17: mod_base = OTHER; note = 2'-O-methyladenosine-3'-phosphate
  modified_base 18: mod_base = OTHER; note = 2'-O-methyladenosine-3'-phosphate
  modified_base 19: mod_base = OTHER; note = 2'-O-methylcytidine-3'-phosphate
  modified_base 20: mod_base = OTHER; note = 2'-O-methyluridine-3'-phosphate
  modified_base 21: mod_base = OTHER; note = 2'-O-methylcytidine-3'-phosphorothioate
  modified_base 22: mod_base = OTHER; note = 2'-O-methylcytidine-3'-phosphorothioate
  modified_base 23: mod_base = OTHER; note = 2'-O-methyluridine-3'-phosphate
actgttgtccacccagaactcct

SEQ ID NO: 3459 - RNA, 23 nt, synthetic construct
  source 1..23: mol_type = other RNA
  modified_base 1: mod_base = OTHER; note = 2'-O-methyladenosine-3'-phosphorothioate
  modified_base 2: mod_base = OTHER; note = 2'-fluoroadenosine-3'-phosphorothioate
  modified_base 3: mod_base = OTHER; note = 2'-O-methylguanosine-3'-phosphate
  modified_base 4: mod_base = OTHER; note = 2'-O-methyladenosine-3'-phosphate
  modified_base 5: mod_base = OTHER; note = 2'-O-methylcytidine-3'-phosphate
  modified_base 6: mod_base = OTHER; note = 2'-fluoroadenosine-3'-phosphate
  modified_base 7: mod_base = OTHER; note = 2'-O-methylcytidine-3'-phosphate
  modified_base 8: mod_base = OTHER; note = 2'-fluorouridine-3'-phosphate
  modified_base 9: mod_base = OTHER; note = 2'-fluoroguanosine-3'-phosphate
  modified_base 10: mod_base = OTHER; note = 2'-O-methyladenosine-3'-phosphate
  modified_base 11: mod_base = OTHER; note = 2'-O-methylguanosine-3'-phosphate
  modified_base 12: mod_base = OTHER; note = 2'-O-methylguanosine-3'-phosphate
  modified_base 13: mod_base = OTHER; note = 2'-O-methyluridine-3'-phosphate
  modified_base 14: mod_base = OTHER; note = 2'-fluoroguanosine-3'-phosphate
  modified_base 15: mod_base = OTHER; note = 2'-O-methylcytidine-3'-phosphate
  modified_base 16: mod_base = OTHER; note = 2'-fluorouridine-3'-phosphate
  modified_base 17: mod_base = OTHER; note = 2'-O-methylguanosine-3'-phosphate
  modified_base 18: mod_base = OTHER; note = 2'-O-methyluridine-3'-phosphate
  modified_base 19: mod_base = OTHER; note = 2'-O-methyluridine-3'-phosphate
  modified_base 20: mod_base = OTHER; note = 2'-O-methylguanosine-3'-phosphate
  modified_base 21: mod_base = OTHER; note = 2'-O-methyluridine-3'-phosphorothioate
  modified_base 22: mod_base = OTHER; note = 2'-O-methylcytidine-3'-phosphorothioate
  modified_base 23: mod_base = OTHER; note = 2'-O-methylcytidine-3'-phosphate
aagacactgaggtgctgttgtcc

SEQ ID NO: 3460 - RNA, 23 nt, synthetic construct
  source 1..23: mol_type = other RNA
  modified_base 1: mod_base = OTHER; note = 2'-O-methyladenosine-3'-phosphorothioate
  modified_base 2: mod_base = OTHER; note = 2'-fluoroadenosine-3'-phosphorothioate
  modified_base 3: mod_base = OTHER; note = 2'-O-methylcytidine-3'-phosphate
  modified_base 4: mod_base = OTHER; note = 2'-O-methyladenosine-3'-phosphate
  modified_base 5: mod_base = OTHER; note = 2'-O-methylguanosine-3'-phosphate
  modified_base 6: mod_base = OTHER; note = 2'-fluoroadenosine-3'-phosphate
  modified_base 7: mod_base = OTHER; note = 2'-O-methylcytidine-3'-phosphate
  modified_base 8: mod_base = OTHER; note = 2'-fluoroadenosine-3'-phosphate
  modified_base 9: mod_base = OTHER; note = 2'-fluorocytidine-3'-phosphate
  modified_base 10: mod_base = OTHER; note = 2'-O-methyluridine-3'-phosphate
  modified_base 11: mod_base = OTHER; note = 2'-O-methylguanosine-3'-phosphate
  modified_base 12: mod_base = OTHER; note = 2'-O-methyladenosine-3'-phosphate
  modified_base 13: mod_base = OTHER; note = 2'-O-methylguanosine-3'-phosphate
  modified_base 14: mod_base = OTHER; note = 2'-fluoroguanosine-3'-phosphate
  modified_base 15: mod_base = OTHER; note = 2'-O-methyluridine-3'-phosphate
  modified_base 16: mod_base = OTHER; note = 2'-fluoroguanosine-3'-phosphate
  modified_base 17: mod_base = OTHER; note = 2'-O-methylcytidine-3'-phosphate
  modified_base 18: mod_base = OTHER; note = 2'-O-methyluridine-3'-phosphate
  modified_base 19: mod_base = OTHER; note = 2'-O-methylguanosine-3'-phosphate
  modified_base 20: mod_base = OTHER; note = 2'-O-methyluridine-3'-phosphate
  modified_base 21: mod_base = OTHER; note = 2'-O-methyluridine-3'-phosphorothioate
  modified_base 22: mod_base = OTHER; note = 2'-O-methylguanosine-3'-phosphorothioate
  modified_base 23: mod_base = OTHER; note = 2'-O-methyluridine-3'-phosphate
aacagacactgaggtgctgttgt

SEQ ID NO: 3461 - RNA, 23 nt, synthetic construct
  source 1..23: mol_type = other RNA
  modified_base 1: mod_base = OTHER; note = 2'-O-methyladenosine-3'-phosphorothioate
  modified_base 2: mod_base = OTHER; note = 2'-fluorocytidine-3'-phosphorothioate
  modified_base 3: mod_base = OTHER; note = 2'-O-methyluridine-3'-phosphate
  modified_base 4: mod_base = OTHER; note = 2'-O-methyluridine-3'-phosphate
  modified_base 5: mod_base = OTHER; note = 2'-O-methylguanosine-3'-phosphate
  modified_base 6: mod_base = OTHER; note = 2'-fluorouridine-3'-phosphate
  modified_base 7: mod_base = OTHER; note = 2'-O-methylcytidine-3'-phosphate
  modified_base 8: mod_base = OTHER; note = 2'-fluorocytidine-3'-phosphate
  modified_base 9: mod_base = OTHER; note = 2'-fluoroadenosine-3'-phosphate
  modified_base 10: mod_base = OTHER; note = 2'-O-methylguanosine-3'-phosphate
  modified_base 11: mod_base = OTHER; note = 2'-O-methylguanosine-3'-phosphate
  modified_base 12: mod_base = OTHER; note = 2'-O-methyluridine-3'-phosphate
  modified_base 13: mod_base = OTHER; note = 2'-O-methylcytidine-3'-phosphate
  modified_base 14: mod_base = OTHER; note = 2'-fluoroadenosine-3'-phosphate
  modified_base 15: mod_base = OTHER; note = 2'-O-methylguanosine-3'-phosphate
  modified_base 16: mod_base = OTHER; note = 2'-fluoroadenosine-3'-phosphate
  modified_base 17: mod_base = OTHER; note = 2'-O-methylguanosine-3'-phosphate
  modified_base 18: mod_base = OTHER; note = 2'-O-methylguanosine-3'-phosphate
  modified_base 19: mod_base = OTHER; note = 2'-O-methylcytidine-3'-phosphate
  modified_base 20: mod_base = OTHER; note = 2'-O-methyladenosine-3'-phosphate
  modified_base 21: mod_base = OTHER; note = 2'-O-methyluridine-3'-phosphorothioate
  modified_base 22: mod_base = OTHER; note = 2'-O-methyladenosine-3'-phosphorothioate
  modified_base 23: mod_base = OTHER; note = 2'-O-methylguanosine-3'-phosphate
acttgtccaggtcagaggcatag

SEQ ID NO: 3462 - RNA, 23 nt, synthetic construct
  source 1..23: mol_type = other RNA
  modified_base 1: mod_base = OTHER; note = 2'-O-methyladenosine-3'-phosphorothioate
  modified_base 2: mod_base = OTHER; note = 2'-fluoroadenosine-3'-phosphorothioate
  modified_base 3: mod_base = OTHER; note = 2'-O-methyladenosine-3'-phosphate
  modified_base 4: mod_base = OTHER; note = 2'-O-methyladenosine-3'-phosphate
  modified_base 5: mod_base = OTHER; note = 2'-O-methylguanosine-3'-phosphate
  modified_base 6: mod_base = OTHER; note = 2'-fluorouridine-3'-phosphate
  modified_base 7: mod_base = OTHER; note = 2'-O-methylguanosine-3'-phosphate
  modified_base 8: mod_base = OTHER; note = 2'-fluoroadenosine-3'-phosphate
  modified_base 9: mod_base = OTHER; note = 2'-fluoroguanosine-3'-phosphate
  modified_base 10: mod_base = OTHER; note = 2'-O-methyladenosine-3'-phosphate
  modified_base 11: mod_base = OTHER; note = 2'-O-methylcytidine-3'-phosphate
  modified_base 12: mod_base = OTHER; note = 2'-O-methylcytidine-3'-phosphate
  modified_base 13: mod_base = OTHER; note = 2'-O-methylcytidine-3'-phosphate
  modified_base 14: mod_base = OTHER; note = 2'-fluorouridine-3'-phosphate
  modified_base 15: mod_base = OTHER; note = 2'-O-methylcytidine-3'-phosphate
  modified_base 16: mod_base = OTHER; note = 2'-fluorocytidine-3'-phosphate
  modified_base 17: mod_base = OTHER; note = 2'-O-methyladenosine-3'-phosphate
  modified_base 18: mod_base = OTHER; note = 2'-O-methylcytidine-3'-phosphate
  modified_base 19: mod_base = OTHER; note = 2'-O-methylcytidine-3'-phosphate
  modified_base 20: mod_base = OTHER; note = 2'-O-methyluridine-3'-phosphate
  modified_base 21: mod_base = OTHER; note = 2'-O-methyluridine-3'-phosphorothioate
  modified_base 22: mod_base = OTHER; note = 2'-O-methylguanosine-3'-phosphorothioate
  modified_base 23: mod_base = OTHER; note = 2'-O-methyluridine-3'-phosphate
aaaagtgagaccctccaccttgt

SEQ ID NO: 3463 - RNA, 23 nt, synthetic construct
  source 1..23: mol_type = other RNA
  modified_base 1: mod_base = OTHER; note = 2'-O-methyladenosine-3'-phosphorothioate
  modified_base 2: mod_base = OTHER; note = 2'-fluoroguanosine-3'-phosphorothioate
  modified_base 3: mod_base = OTHER; note = 2'-O-methyladenosine-3'-phosphate
  modified_base 4: mod_base = OTHER; note = 2'-O-methyladenosine-3'-phosphate
  modified_base 5: mod_base = OTHER; note = 2'-O-methyladenosine-3'-phosphate
  modified_base 6: mod_base = OTHER; note = 2'-fluoroguanosine-3'-phosphate
  modified_base 7: mod_base = OTHER; note = 2'-O-methyluridine-3'-phosphate
  modified_base 8: mod_base = OTHER; note = 2'-fluoroguanosine-3'-phosphate
  modified_base 9: mod_base = OTHER; note = 2'-fluoroadenosine-3'-phosphate
  modified_base 10: mod_base = OTHER; note = 2'-O-methylguanosine-3'-phosphate
  modified_base 11: mod_base = OTHER; note = 2'-O-methyladenosine-3'-phosphate
  modified_base 12: mod_base = OTHER; note = 2'-O-methylcytidine-3'-phosphate
  modified_base 13: mod_base = OTHER; note = 2'-O-methylcytidine-3'-phosphate
  modified_base 14: mod_base = OTHER; note = 2'-fluorocytidine-3'-phosphate
  modified_base 15: mod_base = OTHER; note = 2'-O-methyluridine-3'-phosphate
  modified_base 16: mod_base = OTHER; note = 2'-fluorocytidine-3'-phosphate
  modified_base 17: mod_base = OTHER; note = 2'-O-methylcytidine-3'-phosphate
  modified_base 18: mod_base = OTHER; note = 2'-O-methyladenosine-3'-phosphate
  modified_base 19: mod_base = OTHER; note = 2'-O-methylcytidine-3'-phosphate
  modified_base 20: mod_base = OTHER; note = 2'-O-methylcytidine-3'-phosphate
  modified_base 21: mod_base = OTHER; note = 2'-O-methyluridine-3'-phosphorothioate
  modified_base 22: mod_base = OTHER; note = 2'-O-methyluridine-3'-phosphorothioate
  modified_base 23: mod_base = OTHER; note = 2'-O-methylguanosine-3'-phosphate
agaaagtgagaccctccaccttg

SEQ ID NO: 3464 - RNA, 23 nt, synthetic construct
  source 1..23: mol_type = other RNA
  modified_base 1: mod_base = OTHER; note = 2'-O-methyladenosine-3'-phosphorothioate
  modified_base 2: mod_base = OTHER; note = 2'-fluoroguanosine-3'-phosphorothioate
  modified_base 3: mod_base = OTHER; note = 2'-O-methylguanosine-3'-phosphate
  modified_base 4: mod_base = OTHER; note = 2'-O-methyladenosine-3'-phosphate
  modified_base 5: mod_base = OTHER; note = 2'-O-methyladenosine-3'-phosphate
  modified_base 6: mod_base = OTHER; note = 2'-fluoroadenosine-3'-phosphate
  modified_base 7: mod_base = OTHER; note = 2'-O-methylguanosine-3'-phosphate
  modified_base 8: mod_base = OTHER; note = 2'-fluorouridine-3'-phosphate
  modified_base 9: mod_base = OTHER; note = 2'-fluoroguanosine-3'-phosphate
  modified_base 10: mod_base = OTHER; note = 2'-O-methyladenosine-3'-phosphate
  modified_base 11: mod_base = OTHER; note = 2'-O-methylguanosine-3'-phosphate
  modified_base 12: mod_base = OTHER; note = 2'-O-methyladenosine-3'-phosphate
  modified_base 13: mod_base = OTHER; note = 2'-O-methylcytidine-3'-phosphate
  modified_base 14: mod_base = OTHER; note = 2'-fluorocytidine-3'-phosphate
  modified_base 15: mod_base = OTHER; note = 2'-O-methylcytidine-3'-phosphate
  modified_base 16: mod_base = OTHER; note = 2'-fluorouridine-3'-phosphate
  modified_base 17: mod_base = OTHER; note = 2'-O-methylcytidine-3'-phosphate
  modified_base 18: mod_base = OTHER; note = 2'-O-methylcytidine-3'-phosphate
  modified_base 19: mod_base = OTHER; note = 2'-O-methyladenosine-3'-phosphate
  modified_base 20: mod_base = OTHER; note = 2'-O-methylcytidine-3'-phosphate
  modified_base 21: mod_base = OTHER; note = 2'-O-methylcytidine-3'-phosphorothioate
  modified_base 22: mod_base = OTHER; note = 2'-O-methyluridine-3'-phosphorothioate
  modified_base 23: mod_base = OTHER; note = 2'-O-methyluridine-3'-phosphate
aggaaagtgagaccctccacctt

SEQ ID NO: 3465 - RNA, 23 nt, synthetic construct
  source 1..23: mol_type = other RNA
  modified_base 1: mod_base = OTHER; note = 2'-O-methyladenosine-3'-phosphorothioate
  modified_base 2: mod_base = OTHER; note = 2'-fluorouridine -3'-phosphorothioate
  modified_base 3: mod_base = OTHER; note = 2'-O-methylguanosine-3'-phosphate
  modified_base 4: mod_base = OTHER; note = 2'-O-methylcytidine-3'-phosphate
  modified_base 5: mod_base = OTHER; note = 2'-O-methyluridine-3'-phosphate
  modified_base 6: mod_base = OTHER; note = 2'-fluoroguanosine-3'-phosphate
  modified_base 7: mod_base = OTHER; note = 2'-O-methylguanosine-3'-phosphate
  modified_base 8: mod_base = OTHER; note = 2'-fluoroadenosine-3'-phosphate
  modified_base 9: mod_base = OTHER; note = 2'-fluoroadenosine-3'-phosphate
  modified_base 10: mod_base = OTHER; note = 2'-O-methyladenosine-3'-phosphate
  modified_base 11: mod_base = OTHER; note = 2'-O-methylguanosine-3'-phosphate
  modified_base 12: mod_base = OTHER; note = 2'-O-methyluridine-3'-phosphate
  modified_base 13: mod_base = OTHER; note = 2'-O-methylguanosine-3'-phosphate
  modified_base 14: mod_base = OTHER; note = 2'-fluoroadenosine-3'-phosphate
  modified_base 15: mod_base = OTHER; note = 2'-O-methylguanosine-3'-phosphate
  modified_base 16: mod_base = OTHER; note = 2'-fluoroadenosine-3'-phosphate
  modified_base 17: mod_base = OTHER; note = 2'-O-methylcytidine-3'-phosphate
  modified_base 18: mod_base = OTHER; note = 2'-O-methylcytidine-3'-phosphate
  modified_base 19: mod_base = OTHER; note = 2'-O-methylcytidine-3'-phosphate
  modified_base 20: mod_base = OTHER; note = 2'-O-methyluridine-3'-phosphate
  modified_base 21: mod_base = OTHER; note = 2'-O-methylcytidine-3'-phosphorothioate
  modified_base 22: mod_base = OTHER; note = 2'-O-methylcytidine-3'-phosphorothioate
  modified_base 23: mod_base = OTHER; note = 2'-O-methyladenosine-3'-phosphate
atgctggaaagtgagaccctcca

SEQ ID NO: 3466 - RNA, 23 nt, synthetic construct
  source 1..23: mol_type = other RNA
  modified_base 1: mod_base = OTHER; note = 2'-O-methyladenosine-3'-phosphorothioate
  modified_base 2: mod_base = OTHER; note = 2'-fluorouridine -3'-phosphorothioate
  modified_base 3: mod_base = OTHER; note = 2'-O-methyluridine-3'-phosphate
  modified_base 4: mod_base = OTHER; note = 2'-O-methylguanosine-3'-phosphate
  modified_base 5: mod_base = OTHER; note = 2'-O-methylcytidine-3'-phosphate
  modified_base 6: mod_base = OTHER; note = 2'-fluorouridine-3'-phosphate
  modified_base 7: mod_base = OTHER; note = 2'-O-methylguanosine-3'-phosphate
  modified_base 8: mod_base = OTHER; note = 2'-fluoroguanosine-3'-phosphate
  modified_base 9: mod_base = OTHER; note = 2'-fluoroadenosine-3'-phosphate
  modified_base 10: mod_base = OTHER; note = 2'-O-methyladenosine-3'-phosphate
  modified_base 11: mod_base = OTHER; note = 2'-O-methyladenosine-3'-phosphate
  modified_base 12: mod_base = OTHER; note = 2'-O-methylguanosine-3'-phosphate
  modified_base 13: mod_base = OTHER; note = 2'-O-methyluridine-3'-phosphate
  modified_base 14: mod_base = OTHER; note = 2'-fluoroguanosine-3'-phosphate
  modified_base 15: mod_base = OTHER; note = 2'-O-methyladenosine-3'-phosphate
  modified_base 16: mod_base = OTHER; note = 2'-fluoroguanosine-3'-phosphate
  modified_base 17: mod_base = OTHER; note = 2'-O-methyladenosine-3'-phosphate
  modified_base 18: mod_base = OTHER; note = 2'-O-methylcytidine-3'-phosphate
  modified_base 19: mod_base = OTHER; note = 2'-O-methylcytidine-3'-phosphate
  modified_base 20: mod_base = OTHER; note = 2'-O-methylcytidine-3'-phosphate
  modified_base 21: mod_base = OTHER; note = 2'-O-methyluridine-3'-phosphorothioate
  modified_base 22: mod_base = OTHER; note = 2'-O-methylcytidine-3'-phosphorothioate
  modified_base 23: mod_base = OTHER; note = 2'-O-methylcytidine-3'-phosphate
attgctggaaagtgagaccctcc

SEQ ID NO: 3467 - RNA, 23 nt, synthetic construct
  source 1..23: mol_type = other RNA
  modified_base 1: mod_base = OTHER; note = 2'-O-methyladenosine-3'-phosphorothioate
  modified_base 2: mod_base = OTHER; note = 2'-fluorouridine -3'-phosphorothioate
  modified_base 3: mod_base = OTHER; note = 2'-O-methyluridine-3'-phosphate
  modified_base 4: mod_base = OTHER; note = 2'-O-methyluridine-3'-phosphate
  modified_base 5: mod_base = OTHER; note = 2'-O-methyluridine-3'-phosphate
  modified_base 6: mod_base = OTHER; note = 2'-fluoroguanosine-3'-phosphate
  modified_base 7: mod_base = OTHER; note = 2'-O-methylcytidine-3'-phosphate
  modified_base 8: mod_base = OTHER; note = 2'-fluorouridine-3'-phosphate
  modified_base 9: mod_base = OTHER; note = 2'-fluoroguanosine-3'-phosphate
  modified_base 10: mod_base = OTHER; note = 2'-O-methylguanosine-3'-phosphate
  modified_base 11: mod_base = OTHER; note = 2'-O-methyladenosine-3'-phosphate
  modified_base 12: mod_base = OTHER; note = 2'-O-methyladenosine-3'-phosphate
  modified_base 13: mod_base = OTHER; note = 2'-O-methyladenosine-3'-phosphate
  modified_base 14: mod_base = OTHER; note = 2'-fluoroguanosine-3'-phosphate
  modified_base 15: mod_base = OTHER; note = 2'-O-methyluridine-3'-phosphate
  modified_base 16: mod_base = OTHER; note = 2'-fluoroguanosine-3'-phosphate
  modified_base 17: mod_base = OTHER; note = 2'-O-methyladenosine-3'-phosphate
  modified_base 18: mod_base = OTHER; note = 2'-O-methylguanosine-3'-phosphate
  modified_base 19: mod_base = OTHER; note = 2'-O-methyladenosine-3'-phosphate
  modified_base 20: mod_base = OTHER; note = 2'-O-methylcytidine-3'-phosphate
  modified_base 21: mod_base = OTHER; note = 2'-O-methylcytidine-3'-phosphorothioate
  modified_base 22: mod_base = OTHER; note = 2'-O-methylcytidine-3'-phosphorothioate
  modified_base 23: mod_base = OTHER; note = 2'-O-methyluridine-3'-phosphate
attttgctggaaagtgagaccct

SEQ ID NO: 3468 - RNA, 23 nt, synthetic construct
  source 1..23: mol_type = other RNA
  modified_base 1: mod_base = OTHER; note = 2'-O-methyladenosine-3'-phosphorothioate
  modified_base 2: mod_base = OTHER; note = 2'-fluoroguanosine-3'-phosphorothioate
  modified_base 3: mod_base = OTHER; note = 2'-O-methyluridine-3'-phosphate
  modified_base 4: mod_base = OTHER; note = 2'-O-methyluridine-3'-phosphate
  modified_base 5: mod_base = OTHER; note = 2'-O-methyluridine-3'-phosphate
  modified_base 6: mod_base = OTHER; note = 2'-fluorouridine-3'-phosphate
  modified_base 7: mod_base = OTHER; note = 2'-O-methylguanosine-3'-phosphate
  modified_base 8: mod_base = OTHER; note = 2'-fluorocytidine-3'-phosphate
  modified_base 9: mod_base = OTHER; note = 2'-fluorouridine-3'-phosphate
  modified_base 10: mod_base = OTHER; note = 2'-O-methylguanosine-3'-phosphate
  modified_base 11: mod_base = OTHER; note = 2'-O-methylguanosine-3'-phosphate
  modified_base 12: mod_base = OTHER; note = 2'-O-methyladenosine-3'-phosphate
  modified_base 13: mod_base = OTHER; note = 2'-O-methyladenosine-3'-phosphate
  modified_base 14: mod_base = OTHER; note = 2'-fluoroadenosine-3'-phosphate
  modified_base 15: mod_base = OTHER; note = 2'-O-methylguanosine-3'-phosphate
  modified_base 16: mod_base = OTHER; note = 2'-fluorouridine-3'-phosphate
  modified_base 17: mod_base = OTHER; note = 2'-O-methylguanosine-3'-phosphate
  modified_base 18: mod_base = OTHER; note = 2'-O-methyladenosine-3'-phosphate
  modified_base 19: mod_base = OTHER; note = 2'-O-methylguanosine-3'-phosphate
  modified_base 20: mod_base = OTHER; note = 2'-O-methyladenosine-3'-phosphate
  modified_base 21: mod_base = OTHER; note = 2'-O-methylcytidine-3'-phosphorothioate
  modified_base 22: mod_base = OTHER; note = 2'-O-methylcytidine-3'-phosphorothioate
  modified_base 23: mod_base = OTHER; note = 2'-O-methylcytidine-3'-phosphate
agttttgctggaaagtgagaccc

SEQ ID NO: 3469 - RNA, 23 nt, synthetic construct
  source 1..23: mol_type = other RNA
  modified_base 1: mod_base = OTHER; note = 2'-O-methyladenosine-3'-phosphorothioate
  modified_base 2: mod_base = OTHER; note = 2'-fluoroadenosine-3'-phosphorothioate
  modified_base 3: mod_base = OTHER; note = 2'-O-methylguanosine-3'-phosphate
  modified_base 4: mod_base = OTHER; note = 2'-O-methyluridine-3'-phosphate
  modified_base 5: mod_base = OTHER; note = 2'-O-methyluridine-3'-phosphate
  modified_base 6: mod_base = OTHER; note = 2'-fluorouridine-3'-phosphate
  modified_base 7: mod_base = OTHER; note = 2'-O-methyluridine-3'-phosphate
  modified_base 8: mod_base = OTHER; note = 2'-fluoroguanosine-3'-phosphate
  modified_base 9: mod_base = OTHER; note = 2'-fluorocytidine-3'-phosphate
  modified_base 10: mod_base = OTHER; note = 2'-O-methyluridine-3'-phosphate
  modified_base 11: mod_base = OTHER; note = 2'-O-methylguanosine-3'-phosphate
  modified_base 12: mod_base = OTHER; note = 2'-O-methylguanosine-3'-phosphate
  modified_base 13: mod_base = OTHER; note = 2'-O-methyladenosine-3'-phosphate
  modified_base 14: mod_base = OTHER; note = 2'-fluoroadenosine-3'-phosphate
  modified_base 15: mod_base = OTHER; note = 2'-O-methyladenosine-3'-phosphate
  modified_base 16: mod_base = OTHER; note = 2'-fluoroguanosine-3'-phosphate
  modified_base 17: mod_base = OTHER; note = 2'-O-methyluridine-3'-phosphate
  modified_base 18: mod_base = OTHER; note = 2'-O-methylguanosine-3'-phosphate
  modified_base 19: mod_base = OTHER; note = 2'-O-methyladenosine-3'-phosphate
  modified_base 20: mod_base = OTHER; note = 2'-O-methylguanosine-3'-phosphate
  modified_base 21: mod_base = OTHER; note = 2'-O-methyladenosine-3'-phosphorothioate
  modified_base 22: mod_base = OTHER; note = 2'-O-methylcytidine-3'-phosphorothioate
  modified_base 23: mod_base = OTHER; note = 2'-O-methylcytidine-3'-phosphate
aagttttgctggaaagtgagacc

SEQ ID NO: 3470 - RNA, 23 nt, synthetic construct
  source 1..23: mol_type = other RNA
  modified_base 1: mod_base = OTHER; note = 2'-O-methyladenosine-3'-phosphorothioate
  modified_base 2: mod_base = OTHER; note = 2'-fluoroguanosine-3'-phosphorothioate
  modified_base 3: mod_base = OTHER; note = 2'-O-methylguanosine-3'-phosphate
  modified_base 4: mod_base = OTHER; note = 2'-O-methyladenosine-3'-phosphate
  modified_base 5: mod_base = OTHER; note = 2'-O-methylguanosine-3'-phosphate
  modified_base 6: mod_base = OTHER; note = 2'-fluorouridine-3'-phosphate
  modified_base 7: mod_base = OTHER; note = 2'-O-methyluridine-3'-phosphate
  modified_base 8: mod_base = OTHER; note = 2'-fluorouridine-3'-phosphate
  modified_base 9: mod_base = OTHER; note = 2'-fluorouridine-3'-phosphate
  modified_base 10: mod_base = OTHER; note = 2'-O-methylguanosine-3'-phosphate
  modified_base 11: mod_base = OTHER; note = 2'-O-methylcytidine-3'-phosphate
  modified_base 12: mod_base = OTHER; note = 2'-O-methyluridine-3'-phosphate
  modified_base 13: mod_base = OTHER; note = 2'-O-methylguanosine-3'-phosphate
  modified_base 14: mod_base = OTHER; note = 2'-fluoroguanosine-3'-phosphate
  modified_base 15: mod_base = OTHER; note = 2'-O-methyladenosine-3'-phosphate
  modified_base 16: mod_base = OTHER; note = 2'-fluoroadenosine-3'-phosphate
  modified_base 17: mod_base = OTHER; note = 2'-O-methyladenosine-3'-phosphate
  modified_base 18: mod_base = OTHER; note = 2'-O-methylguanosine-3'-phosphate
  modified_base 19: mod_base = OTHER; note = 2'-O-methyluridine-3'-phosphate
  modified_base 20: mod_base = OTHER; note = 2'-O-methylguanosine-3'-phosphate
  modified_base 21: mod_base = OTHER; note = 2'-O-methyladenosine-3'-phosphorothioate
  modified_base 22: mod_base = OTHER; note = 2'-O-methylguanosine-3'-phosphorothioate
  modified_base 23: mod_base = OTHER; note = 2'-O-methyladenosine-3'-phosphate
aggagttttgctggaaagtgaga

SEQ ID NO: 3471 - RNA, 23 nt, synthetic construct
  source 1..23: mol_type = other RNA
  modified_base 1: mod_base = OTHER; note = 2'-O-methyladenosine-3'-phosphorothioate
  modified_base 2: mod_base = OTHER; note = 2'-fluoroguanosine-3'-phosphorothioate
  modified_base 3: mod_base = OTHER; note = 2'-O-methylguanosine-3'-phosphate
  modified_base 4: mod_base = OTHER; note = 2'-O-methylguanosine-3'-phosphate
  modified_base 5: mod_base = OTHER; note = 2'-O-methyladenosine-3'-phosphate
  modified_base 6: mod_base = OTHER; note = 2'-fluoroguanosine-3'-phosphate
  modified_base 7: mod_base = OTHER; note = 2'-O-methyluridine-3'-phosphate
  modified_base 8: mod_base = OTHER; note = 2'-fluorouridine-3'-phosphate
  modified_base 9: mod_base = OTHER; note = 2'-fluorouridine-3'-phosphate
  modified_base 10: mod_base = OTHER; note = 2'-O-methyluridine-3'-phosphate
  modified_base 11: mod_base = OTHER; note = 2'-O-methylguanosine-3'-phosphate
  modified_base 12: mod_base = OTHER; note = 2'-O-methylcytidine-3'-phosphate
  modified_base 13: mod_base = OTHER; note = 2'-O-methyluridine-3'-phosphate
  modified_base 14: mod_base = OTHER; note = 2'-fluoroguanosine-3'-phosphate
  modified_base 15: mod_base = OTHER; note = 2'-O-methylguanosine-3'-phosphate
  modified_base 16: mod_base = OTHER; note = 2'-fluoroadenosine-3'-phosphate
  modified_base 17: mod_base = OTHER; note = 2'-O-methyladenosine-3'-phosphate
  modified_base 18: mod_base = OTHER; note = 2'-O-methyladenosine-3'-phosphate
  modified_base 19: mod_base = OTHER; note = 2'-O-methylguanosine-3'-phosphate
  modified_base 20: mod_base = OTHER; note = 2'-O-methyluridine-3'-phosphate
  modified_base 21: mod_base = OTHER; note = 2'-O-methylguanosine-3'-phosphorothioate
  modified_base 22: mod_base = OTHER; note = 2'-O-methyladenosine-3'-phosphorothioate
  modified_base 23: mod_base = OTHER; note = 2'-O-methylguanosine-3'-phosphate
agggagttttgctggaaagtgag

SEQ ID NO: 3472 - RNA, 23 nt, synthetic construct
  source 1..23: mol_type = other RNA
  modified_base 1: mod_base = OTHER; note = 2'-O-methyladenosine-3'-phosphorothioate
  modified_base 2: mod_base = OTHER; note = 2'-fluoroadenosine-3'-phosphorothioate
  modified_base 3: mod_base = OTHER; note = 2'-O-methylguanosine-3'-phosphate
  modified_base 4: mod_base = OTHER; note = 2'-O-methylguanosine-3'-phosphate
  modified_base 5: mod_base = OTHER; note = 2'-O-methylguanosine-3'-phosphate
  modified_base 6: mod_base = OTHER; note = 2'-fluoroadenosine-3'-phosphate
  modified_base 7: mod_base = OTHER; note = 2'-O-methylguanosine-3'-phosphate
  modified_base 8: mod_base = OTHER; note = 2'-fluorouridine-3'-phosphate
  modified_base 9: mod_base = OTHER; note = 2'-fluorouridine-3'-phosphate
  modified_base 10: mod_base = OTHER; note = 2'-O-methyluridine-3'-phosphate
  modified_base 11: mod_base = OTHER; note = 2'-O-methyluridine-3'-phosphate
  modified_base 12: mod_base = OTHER; note = 2'-O-methylguanosine-3'-phosphate
  modified_base 13: mod_base = OTHER; note = 2'-O-methylcytidine-3'-phosphate
  modified_base 14: mod_base = OTHER; note = 2'-fluorouridine-3'-phosphate
  modified_base 15: mod_base = OTHER; note = 2'-O-methylguanosine-3'-phosphate
  modified_base 16: mod_base = OTHER; note = 2'-fluoroguanosine-3'-phosphate
  modified_base 17: mod_base = OTHER; note = 2'-O-methyladenosine-3'-phosphate
  modified_base 18: mod_base = OTHER; note = 2'-O-methyladenosine-3'-phosphate
  modified_base 19: mod_base = OTHER; note = 2'-O-methyladenosine-3'-phosphate
  modified_base 20: mod_base = OTHER; note = 2'-O-methylguanosine-3'-phosphate
  modified_base 21: mod_base = OTHER; note = 2'-O-methyluridine-3'-phosphorothioate
  modified_base 22: mod_base = OTHER; note = 2'-O-methylguanosine-3'-phosphorothioate
  modified_base 23: mod_base = OTHER; note = 2'-O-methyladenosine-3'-phosphate
aagggagttttgctggaaagtga

SEQ ID NO: 3473 - RNA, 23 nt, synthetic construct
  source 1..23: mol_type = other RNA
  modified_base 1: mod_base = OTHER; note = 2'-O-methyladenosine-3'-phosphorothioate
  modified_base 2: mod_base = OTHER; note = 2'-fluoroguanosine-3'-phosphorothioate
  modified_base 3: mod_base = OTHER; note = 2'-O-methyladenosine-3'-phosphate
  modified_base 4: mod_base = OTHER; note = 2'-O-methylguanosine-3'-phosphate
  modified_base 5: mod_base = OTHER; note = 2'-O-methylguanosine-3'-phosphate
  modified_base 6: mod_base = OTHER; note = 2'-fluoroguanosine-3'-phosphate
  modified_base 7: mod_base = OTHER; note = 2'-O-methyladenosine-3'-phosphate
  modified_base 8: mod_base = OTHER; note = 2'-fluoroguanosine-3'-phosphate
  modified_base 9: mod_base = OTHER; note = 2'-fluorouridine-3'-phosphate
  modified_base 10: mod_base = OTHER; note = 2'-O-methyluridine-3'-phosphate
  modified_base 11: mod_base = OTHER; note = 2'-O-methyluridine-3'-phosphate
  modified_base 12: mod_base = OTHER; note = 2'-O-methyluridine-3'-phosphate
  modified_base 13: mod_base = OTHER; note = 2'-O-methylguanosine-3'-phosphate
  modified_base 14: mod_base = OTHER; note = 2'-fluorocytidine-3'-phosphate
  modified_base 15: mod_base = OTHER; note = 2'-O-methyluridine-3'-phosphate
  modified_base 16: mod_base = OTHER; note = 2'-fluoroguanosine-3'-phosphate
  modified_base 17: mod_base = OTHER; note = 2'-O-methylguanosine-3'-phosphate
  modified_base 18: mod_base = OTHER; note = 2'-O-methyladenosine-3'-phosphate
  modified_base 19: mod_base = OTHER; note = 2'-O-methyladenosine-3'-phosphate
  modified_base 20: mod_base = OTHER; note = 2'-O-methyladenosine-3'-phosphate
  modified_base 21: mod_base = OTHER; note = 2'-O-methylguanosine-3'-phosphorothioate
  modified_base 22: mod_base = OTHER; note = 2'-O-methyluridine-3'-phosphorothioate
  modified_base 23: mod_base = OTHER; note = 2'-O-methylguanosine-3'-phosphate
agagggagttttgctggaaagtg

SEQ ID NO: 3474 - RNA, 23 nt, synthetic construct
  source 1..23: mol_type = other RNA
  modified_base 1: mod_base = OTHER; note = 2'-O-methyladenosine-3'-phosphorothioate
  modified_base 2: mod_base = OTHER; note = 2'-fluorouridine -3'-phosphorothioate
  modified_base 3: mod_base = OTHER; note = 2'-O-methylguanosine-3'-phosphate
  modified_base 4: mod_base = OTHER; note = 2'-O-methyladenosine-3'-phosphate
  modified_base 5: mod_base = OTHER; note = 2'-O-methylguanosine-3'-phosphate
  modified_base 6: mod_base = OTHER; note = 2'-fluoroguanosine-3'-phosphate
  modified_base 7: mod_base = OTHER; note = 2'-O-methylguanosine-3'-phosphate
  modified_base 8: mod_base = OTHER; note = 2'-fluoroadenosine-3'-phosphate
  modified_base 9: mod_base = OTHER; note = 2'-fluoroguanosine-3'-phosphate
  modified_base 10: mod_base = OTHER; note = 2'-O-methyluridine-3'-phosphate
  modified_base 11: mod_base = OTHER; note = 2'-O-methyluridine-3'-phosphate
  modified_base 12: mod_base = OTHER; note = 2'-O-methyluridine-3'-phosphate
  modified_base 13: mod_base = OTHER; note = 2'-O-methyluridine-3'-phosphate
  modified_base 14: mod_base = OTHER; note = 2'-fluoroguanosine-3'-phosphate
  modified_base 15: mod_base = OTHER; note = 2'-O-methylcytidine-3'-phosphate
  modified_base 16: mod_base = OTHER; note = 2'-fluorouridine-3'-phosphate
  modified_base 17: mod_base = OTHER; note = 2'-O-methylguanosine-3'-phosphate
  modified_base 18: mod_base = OTHER; note = 2'-O-methylguanosine-3'-phosphate
  modified_base 19: mod_base = OTHER; note = 2'-O-methyladenosine-3'-phosphate
  modified_base 20: mod_base = OTHER; note = 2'-O-methyladenosine-3'-phosphate
  modified_base 21: mod_base = OTHER; note = 2'-O-methyladenosine-3'-phosphorothioate
  modified_base 22: mod_base = OTHER; note = 2'-O-methylguanosine-3'-phosphorothioate
  modified_base 23: mod_base = OTHER; note = 2'-O-methyluridine-3'-phosphate
atgagggagttttgctggaaagt

SEQ ID NO: 3475 - RNA, 23 nt, synthetic construct
  source 1..23: mol_type = other RNA
  modified_base 1: mod_base = OTHER; note = 2'-O-methyladenosine-3'-phosphorothioate
  modified_base 2: mod_base = OTHER; note = 2'-fluorouridine -3'-phosphorothioate
  modified_base 3: mod_base = OTHER; note = 2'-O-methyluridine-3'-phosphate
  modified_base 4: mod_base = OTHER; note = 2'-O-methylguanosine-3'-phosphate
  modified_base 5: mod_base = OTHER; note = 2'-O-methyladenosine-3'-phosphate
  modified_base 6: mod_base = OTHER; note = 2'-fluoroguanosine-3'-phosphate
  modified_base 7: mod_base = OTHER; note = 2'-O-methylguanosine-3'-phosphate
  modified_base 8: mod_base = OTHER; note = 2'-fluoroguanosine-3'-phosphate
  modified_base 9: mod_base = OTHER; note = 2'-fluoroadenosine-3'-phosphate
  modified_base 10: mod_base = OTHER; note = 2'-O-methylguanosine-3'-phosphate
  modified_base 11: mod_base = OTHER; note = 2'-O-methyluridine-3'-phosphate
  modified_base 12: mod_base = OTHER; note = 2'-O-methyluridine-3'-phosphate
  modified_base 13: mod_base = OTHER; note = 2'-O-methyluridine-3'-phosphate
  modified_base 14: mod_base = OTHER; note = 2'-fluorouridine-3'-phosphate
  modified_base 15: mod_base = OTHER; note = 2'-O-methylguanosine-3'-phosphate
  modified_base 16: mod_base = OTHER; note = 2'-fluorocytidine-3'-phosphate
  modified_base 17: mod_base = OTHER; note = 2'-O-methyluridine-3'-phosphate
  modified_base 18: mod_base = OTHER; note = 2'-O-methylguanosine-3'-phosphate
  modified_base 19: mod_base = OTHER; note = 2'-O-methylguanosine-3'-phosphate
  modified_base 20: mod_base = OTHER; note = 2'-O-methyladenosine-3'-phosphate
  modified_base 21: mod_base = OTHER; note = 2'-O-methyladenosine-3'-phosphorothioate
  modified_base 22: mod_base = OTHER; note = 2'-O-methyladenosine-3'-phosphorothioate
  modified_base 23: mod_base = OTHER; note = 2'-O-methylguanosine-3'-phosphate
attgagggagttttgctggaaag

SEQ ID NO: 3476 - RNA, 23 nt, synthetic construct
  source 1..23: mol_type = other RNA
  modified_base 1: mod_base = OTHER; note = 2'-O-methyladenosine-3'-phosphorothioate
  modified_base 2: mod_base = OTHER; note = 2'-fluoroguanosine-3'-phosphorothioate
  modified_base 3: mod_base = OTHER; note = 2'-O-methyluridine-3'-phosphate
  modified_base 4: mod_base = OTHER; note = 2'-O-methyluridine-3'-phosphate
  modified_base 5: mod_base = OTHER; note = 2'-O-methylguanosine-3'-phosphate
  modified_base 6: mod_base = OTHER; note = 2'-fluoroadenosine-3'-phosphate
  modified_base 7: mod_base = OTHER; note = 2'-O-methylguanosine-3'-phosphate
  modified_base 8: mod_base = OTHER; note = 2'-fluoroguanosine-3'-phosphate
  modified_base 9: mod_base = OTHER; note = 2'-fluoroguanosine-3'-phosphate
  modified_base 10: mod_base = OTHER; note = 2'-O-methyladenosine-3'-phosphate
  modified_base 11: mod_base = OTHER; note = 2'-O-methylguanosine-3'-phosphate
  modified_base 12: mod_base = OTHER; note = 2'-O-methyluridine-3'-phosphate
  modified_base 13: mod_base = OTHER; note = 2'-O-methyluridine-3'-phosphate
  modified_base 14: mod_base = OTHER; note = 2'-fluorouridine-3'-phosphate
  modified_base 15: mod_base = OTHER; note = 2'-O-methyluridine-3'-phosphate
  modified_base 16: mod_base = OTHER; note = 2'-fluoroguanosine-3'-phosphate
  modified_base 17: mod_base = OTHER; note = 2'-O-methylcytidine-3'-phosphate
  modified_base 18: mod_base = OTHER; note = 2'-O-methyluridine-3'-phosphate
  modified_base 19: mod_base = OTHER; note = 2'-O-methylguanosine-3'-phosphate
  modified_base 20: mod_base = OTHER; note = 2'-O-methylguanosine-3'-phosphate
  modified_base 21: mod_base = OTHER; note = 2'-O-methyladenosine-3'-phosphorothioate
  modified_base 22: mod_base = OTHER; note = 2'-O-methyladenosine-3'-phosphorothioate
  modified_base 23: mod_base = OTHER; note = 2'-O-methyladenosine-3'-phosphate
agttgagggagttttgctggaaa

SEQ ID NO: 3477 - RNA, 23 nt, synthetic construct
  source 1..23: mol_type = other RNA
  modified_base 1: mod_base = OTHER; note = 2'-O-methyladenosine-3'-phosphorothioate
  modified_base 2: mod_base = OTHER; note = 2'-fluoroadenosine-3'-phosphorothioate
  modified_base 3: mod_base = OTHER; note = 2'-O-methylguanosine-3'-phosphate
  modified_base 4: mod_base = OTHER; note = 2'-O-methyluridine-3'-phosphate
  modified_base 5: mod_base = OTHER; note = 2'-O-methyluridine-3'-phosphate
  modified_base 6: mod_base = OTHER; note = 2'-fluoroguanosine-3'-phosphate
  modified_base 7: mod_base = OTHER; note = 2'-O-methyladenosine-3'-phosphate
  modified_base 8: mod_base = OTHER; note = 2'-fluoroguanosine-3'-phosphate
  modified_base 9: mod_base = OTHER; note = 2'-fluoroguanosine-3'-phosphate
  modified_base 10: mod_base = OTHER; note = 2'-O-methylguanosine-3'-phosphate
  modified_base 11: mod_base = OTHER; note = 2'-O-methyladenosine-3'-phosphate
  modified_base 12: mod_base = OTHER; note = 2'-O-methylguanosine-3'-phosphate
  modified_base 13: mod_base = OTHER; note = 2'-O-methyluridine-3'-phosphate
  modified_base 14: mod_base = OTHER; note = 2'-fluorouridine-3'-phosphate
  modified_base 15: mod_base = OTHER; note = 2'-O-methyluridine-3'-phosphate
  modified_base 16: mod_base = OTHER; note = 2'-fluorouridine-3'-phosphate
  modified_base 17: mod_base = OTHER; note = 2'-O-methylguanosine-3'-phosphate
  modified_base 18: mod_base = OTHER; note = 2'-O-methylcytidine-3'-phosphate
  modified_base 19: mod_base = OTHER; note = 2'-O-methyluridine-3'-phosphate
  modified_base 20: mod_base = OTHER; note = 2'-O-methylguanosine-3'-phosphate
  modified_base 21: mod_base = OTHER; note = 2'-O-methylguanosine-3'-phosphorothioate
  modified_base 22: mod_base = OTHER; note = 2'-O-methyladenosine-3'-phosphorothioate
  modified_base 23: mod_base = OTHER; note = 2'-O-methyladenosine-3'-phosphate
aagttgagggagttttgctggaa

SEQ ID NO: 3478 - RNA, 23 nt, synthetic construct
  source 1..23: mol_type = other RNA
  modified_base 1: mod_base = OTHER; note = 2'-O-methyladenosine-3'-phosphorothioate
  modified_base 2: mod_base = OTHER; note = 2'-fluorouridine -3'-phosphorothioate
  modified_base 3: mod_base = OTHER; note = 2'-O-methylcytidine-3'-phosphate
  modified_base 4: mod_base = OTHER; note = 2'-O-methylcytidine-3'-phosphate
  modified_base 5: mod_base = OTHER; note = 2'-O-methyladenosine-3'-phosphate
  modified_base 6: mod_base = OTHER; note = 2'-fluoroguanosine-3'-phosphate
  modified_base 7: mod_base = OTHER; note = 2'-O-methyluridine-3'-phosphate
  modified_base 8: mod_base = OTHER; note = 2'-fluorouridine-3'-phosphate
  modified_base 9: mod_base = OTHER; note = 2'-fluoroguanosine-3'-phosphate
  modified_base 10: mod_base = OTHER; note = 2'-O-methyladenosine-3'-phosphate
  modified_base 11: mod_base = OTHER; note = 2'-O-methylguanosine-3'-phosphate
  modified_base 12: mod_base = OTHER; note = 2'-O-methylguanosine-3'-phosphate
  modified_base 13: mod_base = OTHER; note = 2'-O-methylguanosine-3'-phosphate
  modified_base 14: mod_base = OTHER; note = 2'-fluoroadenosine-3'-phosphate
  modified_base 15: mod_base = OTHER; note = 2'-O-methylguanosine-3'-phosphate
  modified_base 16: mod_base = OTHER; note = 2'-fluorouridine-3'-phosphate
  modified_base 17: mod_base = OTHER; note = 2'-O-methyluridine-3'-phosphate
  modified_base 18: mod_base = OTHER; note = 2'-O-methyluridine-3'-phosphate
  modified_base 19: mod_base = OTHER; note = 2'-O-methyluridine-3'-phosphate
  modified_base 20: mod_base = OTHER; note = 2'-O-methylguanosine-3'-phosphate
  modified_base 21: mod_base = OTHER; note = 2'-O-methylcytidine-3'-phosphorothioate
  modified_base 22: mod_base = OTHER; note = 2'-O-methyluridine-3'-phosphorothioate
  modified_base 23: mod_base = OTHER; note = 2'-O-methylguanosine-3'-phosphate
atccagttgagggagttttgctg

SEQ ID NO: 3479 - RNA, 23 nt, synthetic construct
  source 1..23: mol_type = other RNA
  modified_base 1: mod_base = OTHER; note = 2'-O-methyladenosine-3'-phosphorothioate
  modified_base 2: mod_base = OTHER; note = 2'-fluoroadenosine-3'-phosphorothioate
  modified_base 3: mod_base = OTHER; note = 2'-O-methyluridine-3'-phosphate
  modified_base 4: mod_base = OTHER; note = 2'-O-methylcytidine-3'-phosphate
  modified_base 5: mod_base = OTHER; note = 2'-O-methylcytidine-3'-phosphate
  modified_base 6: mod_base = OTHER; note = 2'-fluoroadenosine-3'-phosphate
  modified_base 7: mod_base = OTHER; note = 2'-O-methylguanosine-3'-phosphate
  modified_base 8: mod_base = OTHER; note = 2'-fluorouridine-3'-phosphate
  modified_base 9: mod_base = OTHER; note = 2'-fluorouridine-3'-phosphate
  modified_base 10: mod_base = OTHER; note = 2'-O-methylguanosine-3'-phosphate
  modified_base 11: mod_base = OTHER; note = 2'-O-methyladenosine-3'-phosphate
  modified_base 12: mod_base = OTHER; note = 2'-O-methylguanosine-3'-phosphate
  modified_base 13: mod_base = OTHER; note = 2'-O-methylguanosine-3'-phosphate
  modified_base 14: mod_base = OTHER; note = 2'-fluoroguanosine-3'-phosphate
  modified_base 15: mod_base = OTHER; note = 2'-O-methyladenosine-3'-phosphate
  modified_base 16: mod_base = OTHER; note = 2'-fluoroguanosine-3'-phosphate
  modified_base 17: mod_base = OTHER; note = 2'-O-methyluridine-3'-phosphate
  modified_base 18: mod_base = OTHER; note = 2'-O-methyluridine-3'-phosphate
  modified_base 19: mod_base = OTHER; note = 2'-O-methyluridine-3'-phosphate
  modified_base 20: mod_base = OTHER; note = 2'-O-methyluridine-3'-phosphate
  modified_base 21: mod_base = OTHER; note = 2'-O-methylguanosine-3'-phosphorothioate
  modified_base 22: mod_base = OTHER; note = 2'-O-methylcytidine-3'-phosphorothioate
  modified_base 23: mod_base = OTHER; note = 2'-O-methyluridine-3'-phosphate
aatccagttgagggagttttgct

SEQ ID NO: 3480 - RNA, 23 nt, synthetic construct
  source 1..23: mol_type = other RNA
  modified_base 1: mod_base = OTHER; note = 2'-O-methyladenosine-3'-phosphorothioate
  modified_base 2: mod_base = OTHER; note = 2'-fluorouridine -3'-phosphorothioate
  modified_base 3: mod_base = OTHER; note = 2'-O-methylcytidine-3'-phosphate
  modified_base 4: mod_base = OTHER; note = 2'-O-methyladenosine-3'-phosphate
  modified_base 5: mod_base = OTHER; note = 2'-O-methyluridine-3'-phosphate
  modified_base 6: mod_base = OTHER; note = 2'-fluorocytidine-3'-phosphate
  modified_base 7: mod_base = OTHER; note = 2'-O-methylcytidine-3'-phosphate
  modified_base 8: mod_base = OTHER; note = 2'-fluoroadenosine-3'-phosphate
  modified_base 9: mod_base = OTHER; note = 2'-fluoroguanosine-3'-phosphate
  modified_base 10: mod_base = OTHER; note = 2'-O-methyluridine-3'-phosphate
  modified_base 11: mod_base = OTHER; note = 2'-O-methyluridine-3'-phosphate
  modified_base 12: mod_base = OTHER; note = 2'-O-methylguanosine-3'-phosphate
  modified_base 13: mod_base = OTHER; note = 2'-O-methyladenosine-3'-phosphate
  modified_base 14: mod_base = OTHER; note = 2'-fluoroguanosine-3'-phosphate
  modified_base 15: mod_base = OTHER; note = 2'-O-methylguanosine-3'-phosphate
  modified_base 16: mod_base = OTHER; note = 2'-fluoroguanosine-3'-phosphate
  modified_base 17: mod_base = OTHER; note = 2'-O-methyladenosine-3'-phosphate
  modified_base 18: mod_base = OTHER; note = 2'-O-methylguanosine-3'-phosphate
  modified_base 19: mod_base = OTHER; note = 2'-O-methyluridine-3'-phosphate
  modified_base 20: mod_base = OTHER; note = 2'-O-methyluridine-3'-phosphate
  modified_base 21: mod_base = OTHER; note = 2'-O-methyluridine-3'-phosphorothioate
  modified_base 22: mod_base = OTHER; note = 2'-O-methyluridine-3'-phosphorothioate
  modified_base 23: mod_base = OTHER; note = 2'-O-methylguanosine-3'-phosphate
atcatccagttgagggagttttg

SEQ ID NO: 3481 - RNA, 23 nt, synthetic construct
  source 1..23: mol_type = other RNA
  modified_base 1: mod_base = OTHER; note = 2'-O-methyladenosine-3'-phosphorothioate
  modified_base 2: mod_base = OTHER; note = 2'-fluorouridine -3'-phosphorothioate
  modified_base 3: mod_base = OTHER; note = 2'-O-methyluridine-3'-phosphate
  modified_base 4: mod_base = OTHER; note = 2'-O-methylcytidine-3'-phosphate
  modified_base 5: mod_base = OTHER; note = 2'-O-methyladenosine-3'-phosphate
  modified_base 6: mod_base = OTHER; note = 2'-fluorouridine-3'-phosphate
  modified_base 7: mod_base = OTHER; note = 2'-O-methylcytidine-3'-phosphate
  modified_base 8: mod_base = OTHER; note = 2'-fluorocytidine-3'-phosphate
  modified_base 9: mod_base = OTHER; note = 2'-fluoroadenosine-3'-phosphate
  modified_base 10: mod_base = OTHER; note = 2'-O-methylguanosine-3'-phosphate
  modified_base 11: mod_base = OTHER; note = 2'-O-methyluridine-3'-phosphate
  modified_base 12: mod_base = OTHER; note = 2'-O-methyluridine-3'-phosphate
  modified_base 13: mod_base = OTHER; note = 2'-O-methylguanosine-3'-phosphate
  modified_base 14: mod_base = OTHER; note = 2'-fluoroadenosine-3'-phosphate
  modified_base 15: mod_base = OTHER; note = 2'-O-methylguanosine-3'-phosphate
  modified_base 16: mod_base = OTHER; note = 2'-fluoroguanosine-3'-phosphate
  modified_base 17: mod_base = OTHER; note = 2'-O-methylguanosine-3'-phosphate
  modified_base 18: mod_base = OTHER; note = 2'-O-methyladenosine-3'-phosphate
  modified_base 19: mod_base = OTHER; note = 2'-O-methylguanosine-3'-phosphate
  modified_base 20: mod_base = OTHER; note = 2'-O-methyluridine-3'-phosphate
  modified_base 21: mod_base = OTHER; note = 2'-O-methyluridine-3'-phosphorothioate
  modified_base 22: mod_base = OTHER; note = 2'-O-methyluridine-3'-phosphorothioate
  modified_base 23: mod_base = OTHER; note = 2'-O-methyluridine-3'-phosphate
attcatccagttgagggagtttt

SEQ ID NO: 3482 - RNA, 23 nt, synthetic construct
  source 1..23: mol_type = other RNA
  modified_base 1: mod_base = OTHER; note = 2'-O-methyladenosine-3'-phosphorothioate
  modified_base 2: mod_base = OTHER; note = 2'-fluorouridine -3'-phosphorothioate
  modified_base 3: mod_base = OTHER; note = 2'-O-methylcytidine-3'-phosphate
  modified_base 4: mod_base = OTHER; note = 2'-O-methyluridine-3'-phosphate
  modified_base 5: mod_base = OTHER; note = 2'-O-methyluridine-3'-phosphate
  modified_base 6: mod_base = OTHER; note = 2'-fluorocytidine-3'-phosphate
  modified_base 7: mod_base = OTHER; note = 2'-O-methyladenosine-3'-phosphate
  modified_base 8: mod_base = OTHER; note = 2'-fluorouridine-3'-phosphate
  modified_base 9: mod_base = OTHER; note = 2'-fluorocytidine-3'-phosphate
  modified_base 10: mod_base = OTHER; note = 2'-O-methylcytidine-3'-phosphate
  modified_base 11: mod_base = OTHER; note = 2'-O-methyladenosine-3'-phosphate
  modified_base 12: mod_base = OTHER; note = 2'-O-methylguanosine-3'-phosphate
  modified_base 13: mod_base = OTHER; note = 2'-O-methyluridine-3'-phosphate
  modified_base 14: mod_base = OTHER; note = 2'-fluorouridine-3'-phosphate
  modified_base 15: mod_base = OTHER; note = 2'-O-methylguanosine-3'-phosphate
  modified_base 16: mod_base = OTHER; note = 2'-fluoroadenosine-3'-phosphate
  modified_base 17: mod_base = OTHER; note = 2'-O-methylguanosine-3'-phosphate
  modified_base 18: mod_base = OTHER; note = 2'-O-methylguanosine-3'-phosphate
  modified_base 19: mod_base = OTHER; note = 2'-O-methylguanosine-3'-phosphate
  modified_base 20: mod_base = OTHER; note = 2'-O-methyladenosine-3'-phosphate
  modified_base 21: mod_base = OTHER; note = 2'-O-methylguanosine-3'-phosphorothioate
  modified_base 22: mod_base = OTHER; note = 2'-O-methyluridine-3'-phosphorothioate
  modified_base 23: mod_base = OTHER; note = 2'-O-methyluridine-3'-phosphate
atcttcatccagttgagggagtt

SEQ ID NO: 3483 - RNA, 23 nt, synthetic construct
  source 1..23: mol_type = other RNA
  modified_base 1: mod_base = OTHER; note = 2'-O-methyladenosine-3'-phosphorothioate
  modified_base 2: mod_base = OTHER; note = 2'-fluorouridine -3'-phosphorothioate
  modified_base 3: mod_base = OTHER; note = 2'-O-methyluridine-3'-phosphate
  modified_base 4: mod_base = OTHER; note = 2'-O-methylcytidine-3'-phosphate
  modified_base 5: mod_base = OTHER; note = 2'-O-methyluridine-3'-phosphate
  modified_base 6: mod_base = OTHER; note = 2'-fluorouridine-3'-phosphate
  modified_base 7: mod_base = OTHER; note = 2'-O-methylcytidine-3'-phosphate
  modified_base 8: mod_base = OTHER; note = 2'-fluoroadenosine-3'-phosphate
  modified_base 9: mod_base = OTHER; note = 2'-fluorouridine-3'-phosphate
  modified_base 10: mod_base = OTHER; note = 2'-O-methylcytidine-3'-phosphate
  modified_base 11: mod_base = OTHER; note = 2'-O-methylcytidine-3'-phosphate
  modified_base 12: mod_base = OTHER; note = 2'-O-methyladenosine-3'-phosphate
  modified_base 13: mod_base = OTHER; note = 2'-O-methylguanosine-3'-phosphate
  modified_base 14: mod_base = OTHER; note = 2'-fluorouridine-3'-phosphate
  modified_base 15: mod_base = OTHER; note = 2'-O-methyluridine-3'-phosphate
  modified_base 16: mod_base = OTHER; note = 2'-fluoroguanosine-3'-phosphate
  modified_base 17: mod_base = OTHER; note = 2'-O-methyladenosine-3'-phosphate
  modified_base 18: mod_base = OTHER; note = 2'-O-methylguanosine-3'-phosphate
  modified_base 19: mod_base = OTHER; note = 2'-O-methylguanosine-3'-phosphate
  modified_base 20: mod_base = OTHER; note = 2'-O-methylguanosine-3'-phosphate
  modified_base 21: mod_base = OTHER; note = 2'-O-methyladenosine-3'-phosphorothioate
  modified_base 22: mod_base = OTHER; note = 2'-O-methylguanosine-3'-phosphorothioate
  modified_base 23: mod_base = OTHER; note = 2'-O-methyluridine-3'-phosphate
attcttcatccagttgagggagt

SEQ ID NO: 3484 - RNA, 23 nt, synthetic construct
  source 1..23: mol_type = other RNA
  modified_base 1: mod_base = OTHER; note = 2'-O-methyladenosine-3'-phosphorothioate
  modified_base 2: mod_base = OTHER; note = 2'-fluorouridine -3'-phosphorothioate
  modified_base 3: mod_base = OTHER; note = 2'-O-methyluridine-3'-phosphate
  modified_base 4: mod_base = OTHER; note = 2'-O-methyluridine-3'-phosphate
  modified_base 5: mod_base = OTHER; note = 2'-O-methylcytidine-3'-phosphate
  modified_base 6: mod_base = OTHER; note = 2'-fluorouridine-3'-phosphate
  modified_base 7: mod_base = OTHER; note = 2'-O-methyluridine-3'-phosphate
  modified_base 8: mod_base = OTHER; note = 2'-fluorocytidine-3'-phosphate
  modified_base 9: mod_base = OTHER; note = 2'-fluoroadenosine-3'-phosphate
  modified_base 10: mod_base = OTHER; note = 2'-O-methyluridine-3'-phosphate
  modified_base 11: mod_base = OTHER; note = 2'-O-methylcytidine-3'-phosphate
  modified_base 12: mod_base = OTHER; note = 2'-O-methylcytidine-3'-phosphate
  modified_base 13: mod_base = OTHER; note = 2'-O-methyladenosine-3'-phosphate
  modified_base 14: mod_base = OTHER; note = 2'-fluoroguanosine-3'-phosphate
  modified_base 15: mod_base = OTHER; note = 2'-O-methyluridine-3'-phosphate
  modified_base 16: mod_base = OTHER; note = 2'-fluorouridine-3'-phosphate
  modified_base 17: mod_base = OTHER; note = 2'-O-methylguanosine-3'-phosphate
  modified_base 18: mod_base = OTHER; note = 2'-O-methyladenosine-3'-phosphate
  modified_base 19: mod_base = OTHER; note = 2'-O-methylguanosine-3'-phosphate
  modified_base 20: mod_base = OTHER; note = 2'-O-methylguanosine-3'-phosphate
  modified_base 21: mod_base = OTHER; note = 2'-O-methylguanosine-3'-phosphorothioate
  modified_base 22: mod_base = OTHER; note = 2'-O-methyladenosine-3'-phosphorothioate
  modified_base 23: mod_base = OTHER; note = 2'-O-methylguanosine-3'-phosphate
atttcttcatccagttgagggag

SEQ ID NO: 3485 - RNA, 23 nt, synthetic construct
  source 1..23: mol_type = other RNA
  modified_base 1: mod_base = OTHER; note = 2'-O-methyladenosine-3'-phosphorothioate
  modified_base 2: mod_base = OTHER; note = 2'-fluoroadenosine-3'-phosphorothioate
  modified_base 3: mod_base = OTHER; note = 2'-O-methylguanosine-3'-phosphate
  modified_base 4: mod_base = OTHER; note = 2'-O-methyluridine-3'-phosphate
  modified_base 5: mod_base = OTHER; note = 2'-O-methyluridine-3'-phosphate
  modified_base 6: mod_base = OTHER; note = 2'-fluorouridine-3'-phosphate
  modified_base 7: mod_base = OTHER; note = 2'-O-methylcytidine-3'-phosphate
  modified_base 8: mod_base = OTHER; note = 2'-fluorouridine-3'-phosphate
  modified_base 9: mod_base = OTHER; note = 2'-fluorouridine-3'-phosphate
  modified_base 10: mod_base = OTHER; note = 2'-O-methylcytidine-3'-phosphate
  modified_base 11: mod_base = OTHER; note = 2'-O-methyladenosine-3'-phosphate
  modified_base 12: mod_base = OTHER; note = 2'-O-methyluridine-3'-phosphate
  modified_base 13: mod_base = OTHER; note = 2'-O-methylcytidine-3'-phosphate
  modified_base 14: mod_base = OTHER; note = 2'-fluorocytidine-3'-phosphate
  modified_base 15: mod_base = OTHER; note = 2'-O-methyladenosine-3'-phosphate
  modified_base 16: mod_base = OTHER; note = 2'-fluoroguanosine-3'-phosphate
  modified_base 17: mod_base = OTHER; note = 2'-O-methyluridine-3'-phosphate
  modified_base 18: mod_base = OTHER; note = 2'-O-methyluridine-3'-phosphate
  modified_base 19: mod_base = OTHER; note = 2'-O-methylguanosine-3'-phosphate
  modified_base 20: mod_base = OTHER; note = 2'-O-methyladenosine-3'-phosphate
  modified_base 21: mod_base = OTHER; note = 2'-O-methylguanosine-3'-phosphorothioate
  modified_base 22: mod_base = OTHER; note = 2'-O-methylguanosine-3'-phosphorothioate
  modified_base 23: mod_base = OTHER; note = 2'-O-methylguanosine-3'-phosphate
aagtttcttcatccagttgaggg

SEQ ID NO: 3486 - RNA, 23 nt, synthetic construct
  source 1..23: mol_type = other RNA
  modified_base 1: mod_base = OTHER; note = 2'-O-methyladenosine-3'-phosphorothioate
  modified_base 2: mod_base = OTHER; note = 2'-fluorocytidine-3'-phosphorothioate
  modified_base 3: mod_base = OTHER; note = 2'-O-methylcytidine-3'-phosphate
  modified_base 4: mod_base = OTHER; note = 2'-O-methyluridine-3'-phosphate
  modified_base 5: mod_base = OTHER; note = 2'-O-methylguanosine-3'-phosphate
  modified_base 6: mod_base = OTHER; note = 2'-fluorocytidine-3'-phosphate
  modified_base 7: mod_base = OTHER; note = 2'-O-methyladenosine-3'-phosphate
  modified_base 8: mod_base = OTHER; note = 2'-fluoroguanosine-3'-phosphate
  modified_base 9: mod_base = OTHER; note = 2'-fluoroguanosine-3'-phosphate
  modified_base 10: mod_base = OTHER; note = 2'-O-methyluridine-3'-phosphate
  modified_base 11: mod_base = OTHER; note = 2'-O-methylcytidine-3'-phosphate
  modified_base 12: mod_base = OTHER; note = 2'-O-methyladenosine-3'-phosphate
  modified_base 13: mod_base = OTHER; note = 2'-O-methyluridine-3'-phosphate
  modified_base 14: mod_base = OTHER; note = 2'-fluoroadenosine-3'-phosphate
  modified_base 15: mod_base = OTHER; note = 2'-O-methyladenosine-3'-phosphate
  modified_base 16: mod_base = OTHER; note = 2'-fluoroguanosine-3'-phosphate
  modified_base 17: mod_base = OTHER; note = 2'-O-methyladenosine-3'-phosphate
  modified_base 18: mod_base = OTHER; note = 2'-O-methyluridine-3'-phosphate
  modified_base 19: mod_base = OTHER; note = 2'-O-methylcytidine-3'-phosphate
  modified_base 20: mod_base = OTHER; note = 2'-O-methylcytidine-3'-phosphate
  modified_base 21: mod_base = OTHER; note = 2'-O-methyluridine-3'-phosphorothioate
  modified_base 22: mod_base = OTHER; note = 2'-O-methyluridine-3'-phosphorothioate
  modified_base 23: mod_base = OTHER; note = 2'-O-methylguanosine-3'-phosphate
acctgcaggtcataagatccttg

SEQ ID NO: 3487 - RNA, 23 nt, synthetic construct
  source 1..23: mol_type = other RNA
  modified_base 1: mod_base = OTHER; note = 2'-O-methyladenosine-3'-phosphorothioate
  modified_base 2: mod_base = OTHER; note = 2'-fluorouridine -3'-phosphorothioate
  modified_base 3: mod_base = OTHER; note = 2'-O-methylguanosine-3'-phosphate
  modified_base 4: mod_base = OTHER; note = 2'-O-methylcytidine-3'-phosphate
  modified_base 5: mod_base = OTHER; note = 2'-O-methyluridine-3'-phosphate
  modified_base 6: mod_base = OTHER; note = 2'-fluorocytidine-3'-phosphate
  modified_base 7: mod_base = OTHER; note = 2'-O-methyladenosine-3'-phosphate
  modified_base 8: mod_base = OTHER; note = 2'-fluoroadenosine-3'-phosphate
  modified_base 9: mod_base = OTHER; note = 2'-fluorouridine-3'-phosphate
  modified_base 10: mod_base = OTHER; note = 2'-O-methyluridine-3'-phosphate
  modified_base 11: mod_base = OTHER; note = 2'-O-methyluridine-3'-phosphate
  modified_base 12: mod_base = OTHER; note = 2'-O-methyluridine-3'-phosphate
  modified_base 13: mod_base = OTHER; note = 2'-O-methyluridine-3'-phosphate
  modified_base 14: mod_base = OTHER; note = 2'-fluoroguanosine-3'-phosphate
  modified_base 15: mod_base = OTHER; note = 2'-O-methylcytidine-3'-phosphate
  modified_base 16: mod_base = OTHER; note = 2'-fluoroadenosine-3'-phosphate
  modified_base 17: mod_base = OTHER; note = 2'-O-methylguanosine-3'-phosphate
  modified_base 18: mod_base = OTHER; note = 2'-O-methylguanosine-3'-phosphate
  modified_base 19: mod_base = OTHER; note = 2'-O-methyluridine-3'-phosphate
  modified_base 20: mod_base = OTHER; note = 2'-O-methyluridine-3'-phosphate
  modified_base 21: mod_base = OTHER; note = 2'-O-methylcytidine-3'-phosphorothioate
  modified_base 22: mod_base = OTHER; note = 2'-O-methyladenosine-3'-phosphorothioate
  modified_base 23: mod_base = OTHER; note = 2'-O-methylguanosine-3'-phosphate
atgctcaatttttgcaggttcag

SEQ ID NO: 3488 - RNA, 23 nt, synthetic construct
  source 1..23: mol_type = other RNA
  modified_base 1: mod_base = OTHER; note = 2'-O-methyladenosine-3'-phosphorothioate
  modified_base 2: mod_base = OTHER; note = 2'-fluorouridine -3'-phosphorothioate
  modified_base 3: mod_base = OTHER; note = 2'-O-methyluridine-3'-phosphate
  modified_base 4: mod_base = OTHER; note = 2'-O-methylguanosine-3'-phosphate
  modified_base 5: mod_base = OTHER; note = 2'-O-methylcytidine-3'-phosphate
  modified_base 6: mod_base = OTHER; note = 2'-fluorouridine-3'-phosphate
  modified_base 7: mod_base = OTHER; note = 2'-O-methylcytidine-3'-phosphate
  modified_base 8: mod_base = OTHER; note = 2'-fluoroadenosine-3'-phosphate
  modified_base 9: mod_base = OTHER; note = 2'-fluoroadenosine-3'-phosphate
  modified_base 10: mod_base = OTHER; note = 2'-O-methyluridine-3'-phosphate
  modified_base 11: mod_base = OTHER; note = 2'-O-methyluridine-3'-phosphate
  modified_base 12: mod_base = OTHER; note = 2'-O-methyluridine-3'-phosphate
  modified_base 13: mod_base = OTHER; note = 2'-O-methyluridine-3'-phosphate
  modified_base 14: mod_base = OTHER; note = 2'-fluorouridine-3'-phosphate
  modified_base 15: mod_base = OTHER; note = 2'-O-methylguanosine-3'-phosphate
  modified_base 16: mod_base = OTHER; note = 2'-fluorocytidine-3'-phosphate
  modified_base 17: mod_base = OTHER; note = 2'-O-methyladenosine-3'-phosphate
  modified_base 18: mod_base = OTHER; note = 2'-O-methylguanosine-3'-phosphate
  modified_base 19: mod_base = OTHER; note = 2'-O-methylguanosine-3'-phosphate
  modified_base 20: mod_base = OTHER; note = 2'-O-methyluridine-3'-phosphate
  modified_base 21: mod_base = OTHER; note = 2'-O-methyluridine-3'-phosphorothioate
  modified_base 22: mod_base = OTHER; note = 2'-O-methylcytidine-3'-phosphorothioate
  modified_base 23: mod_base = OTHER; note = 2'-O-methyladenosine-3'-phosphate
attgctcaatttttgcaggttca

SEQ ID NO: 3489 - RNA, 23 nt, synthetic construct
  source 1..23: mol_type = other RNA
  modified_base 1: mod_base = OTHER; note = 2'-O-methyladenosine-3'-phosphorothioate
  modified_base 2: mod_base = OTHER; note = 2'-fluoroadenosine-3'-phosphorothioate
  modified_base 3: mod_base = OTHER; note = 2'-O-methyluridine-3'-phosphate
  modified_base 4: mod_base = OTHER; note = 2'-O-methyluridine-3'-phosphate
  modified_base 5: mod_base = OTHER; note = 2'-O-methylguanosine-3'-phosphate
  modified_base 6: mod_base = OTHER; note = 2'-fluorocytidine-3'-phosphate
  modified_base 7: mod_base = OTHER; note = 2'-O-methyluridine-3'-phosphate
  modified_base 8: mod_base = OTHER; note = 2'-fluorocytidine-3'-phosphate
  modified_base 9: mod_base = OTHER; note = 2'-fluoroadenosine-3'-phosphate
  modified_base 10: mod_base = OTHER; note = 2'-O-methyladenosine-3'-phosphate
  modified_base 11: mod_base = OTHER; note = 2'-O-methyluridine-3'-phosphate
  modified_base 12: mod_base = OTHER; note = 2'-O-methyluridine-3'-phosphate
  modified_base 13: mod_base = OTHER; note = 2'-O-methyluridine-3'-phosphate
  modified_base 14: mod_base = OTHER; note = 2'-fluorouridine-3'-phosphate
  modified_base 15: mod_base = OTHER; note = 2'-O-methyluridine-3'-phosphate
  modified_base 16: mod_base = OTHER; note = 2'-fluoroguanosine-3'-phosphate
  modified_base 17: mod_base = OTHER; note = 2'-O-methylcytidine-3'-phosphate
  modified_base 18: mod_base = OTHER; note = 2'-O-methyladenosine-3'-phosphate
  modified_base 19: mod_base = OTHER; note = 2'-O-methylguanosine-3'-phosphate
  modified_base 20: mod_base = OTHER; note = 2'-O-methylguanosine-3'-phosphate
  modified_base 21: mod_base = OTHER; note = 2'-O-methyluridine-3'-phosphorothioate
  modified_base 22: mod_base = OTHER; note = 2'-O-methyluridine-3'-phosphorothioate
  modified_base 23: mod_base = OTHER; note = 2'-O-methylcytidine-3'-phosphate
aattgctcaatttttgcaggttc

SEQ ID NO: 3490 - RNA, 23 nt, synthetic construct
  source 1..23: mol_type = other RNA
  modified_base 1: mod_base = OTHER; note = 2'-O-methyladenosine-3'-phosphorothioate
  modified_base 2: mod_base = OTHER; note = 2'-fluorocytidine-3'-phosphorothioate
  modified_base 3: mod_base = OTHER; note = 2'-O-methyladenosine-3'-phosphate
  modified_base 4: mod_base = OTHER; note = 2'-O-methyluridine-3'-phosphate
  modified_base 5: mod_base = OTHER; note = 2'-O-methyluridine-3'-phosphate
  modified_base 6: mod_base = OTHER; note = 2'-fluoroguanosine-3'-phosphate
  modified_base 7: mod_base = OTHER; note = 2'-O-methylcytidine-3'-phosphate
  modified_base 8: mod_base = OTHER; note = 2'-fluorouridine-3'-phosphate
  modified_base 9: mod_base = OTHER; note = 2'-fluorocytidine-3'-phosphate
  modified_base 10: mod_base = OTHER; note = 2'-O-methyladenosine-3'-phosphate
  modified_base 11: mod_base = OTHER; note = 2'-O-methyladenosine-3'-phosphate
  modified_base 12: mod_base = OTHER; note = 2'-O-methyluridine-3'-phosphate
  modified_base 13: mod_base = OTHER; note = 2'-O-methyluridine-3'-phosphate
  modified_base 14: mod_base = OTHER; note = 2'-fluorouridine-3'-phosphate
  modified_base 15: mod_base = OTHER; note = 2'-O-methyluridine-3'-phosphate
  modified_base 16: mod_base = OTHER; note = 2'-fluorouridine-3'-phosphate
  modified_base 17: mod_base = OTHER; note = 2'-O-methylguanosine-3'-phosphate
  modified_base 18: mod_base = OTHER; note = 2'-O-methylcytidine-3'-phosphate
  modified_base 19: mod_base = OTHER; note = 2'-O-methyladenosine-3'-phosphate
  modified_base 20: mod_base = OTHER; note = 2'-O-methylguanosine-3'-phosphate
  modified_base 21: mod_base = OTHER; note = 2'-O-methylguanosine-3'-phosphorothioate
  modified_base 22: mod_base = OTHER; note = 2'-O-methyluridine-3'-phosphorothioate
  modified_base 23: mod_base = OTHER; note = 2'-O-methyluridine-3'-phosphate
acattgctcaatttttgcaggtt

SEQ ID NO: 3491 - RNA, 23 nt, synthetic construct
  source 1..23: mol_type = other RNA
  modified_base 1: mod_base = OTHER; note = 2'-O-methyladenosine-3'-phosphorothioate
  modified_base 2: mod_base = OTHER; note = 2'-fluorouridine -3'-phosphorothioate
  modified_base 3: mod_base = OTHER; note = 2'-O-methylcytidine-3'-phosphate
  modified_base 4: mod_base = OTHER; note = 2'-O-methyladenosine-3'-phosphate
  modified_base 5: mod_base = OTHER; note = 2'-O-methyluridine-3'-phosphate
  modified_base 6: mod_base = OTHER; note = 2'-fluorouridine-3'-phosphate
  modified_base 7: mod_base = OTHER; note = 2'-O-methylguanosine-3'-phosphate
  modified_base 8: mod_base = OTHER; note = 2'-fluorocytidine-3'-phosphate
  modified_base 9: mod_base = OTHER; note = 2'-fluorouridine-3'-phosphate
  modified_base 10: mod_base = OTHER; note = 2'-O-methylcytidine-3'-phosphate
  modified_base 11: mod_base = OTHER; note = 2'-O-methyladenosine-3'-phosphate
  modified_base 12: mod_base = OTHER; note = 2'-O-methyladenosine-3'-phosphate
  modified_base 13: mod_base = OTHER; note = 2'-O-methyluridine-3'-phosphate
  modified_base 14: mod_base = OTHER; note = 2'-fluorouridine-3'-phosphate
  modified_base 15: mod_base = OTHER; note = 2'-O-methyluridine-3'-phosphate
  modified_base 16: mod_base = OTHER; note = 2'-fluorouridine-3'-phosphate
  modified_base 17: mod_base = OTHER; note = 2'-O-methyluridine-3'-phosphate
  modified_base 18: mod_base = OTHER; note = 2'-O-methylguanosine-3'-phosphate
  modified_base 19: mod_base = OTHER; note = 2'-O-methylcytidine-3'-phosphate
  modified_base 20: mod_base = OTHER; note = 2'-O-methyladenosine-3'-phosphate
  modified_base 21: mod_base = OTHER; note = 2'-O-methylguanosine-3'-phosphorothioate
  modified_base 22: mod_base = OTHER; note = 2'-O-methylguanosine-3'-phosphorothioate
  modified_base 23: mod_base = OTHER; note = 2'-O-methyluridine-3'-phosphate
atcattgctcaatttttgcaggt

SEQ ID NO: 3492 - RNA, 23 nt, synthetic construct
  source 1..23: mol_type = other RNA
  modified_base 1: mod_base = OTHER; note = 2'-O-methyladenosine-3'-phosphorothioate
  modified_base 2: mod_base = OTHER; note = 2'-fluoroadenosine-3'-phosphorothioate
  modified_base 3: mod_base = OTHER; note = 2'-O-methylcytidine-3'-phosphate
  modified_base 4: mod_base = OTHER; note = 2'-O-methyluridine-3'-phosphate
  modified_base 5: mod_base = OTHER; note = 2'-O-methylcytidine-3'-phosphate
  modified_base 6: mod_base = OTHER; note = 2'-fluorouridine-3'-phosphate
  modified_base 7: mod_base = OTHER; note = 2'-O-methylguanosine-3'-phosphate
  modified_base 8: mod_base = OTHER; note = 2'-fluorouridine-3'-phosphate
  modified_base 9: mod_base = OTHER; note = 2'-fluoroguanosine-3'-phosphate
  modified_base 10: mod_base = OTHER; note = 2'-O-methylguanosine-3'-phosphate
  modified_base 11: mod_base = OTHER; note = 2'-O-methylguanosine-3'-phosphate
  modified_base 12: mod_base = OTHER; note = 2'-O-methylcytidine-3'-phosphate
  modified_base 13: mod_base = OTHER; note = 2'-O-methyluridine-3'-phosphate
  modified_base 14: mod_base = OTHER; note = 2'-fluorocytidine-3'-phosphate
  modified_base 15: mod_base = OTHER; note = 2'-O-methyluridine-3'-phosphate
  modified_base 16: mod_base = OTHER; note = 2'-fluorocytidine-3'-phosphate
  modified_base 17: mod_base = OTHER; note = 2'-O-methyluridine-3'-phosphate
  modified_base 18: mod_base = OTHER; note = 2'-O-methylcytidine-3'-phosphate
  modified_base 19: mod_base = OTHER; note = 2'-O-methyluridine-3'-phosphate
  modified_base 20: mod_base = OTHER; note = 2'-O-methylcytidine-3'-phosphate
  modified_base 21: mod_base = OTHER; note = 2'-O-methyladenosine-3'-phosphorothioate
  modified_base 22: mod_base = OTHER; note = 2'-O-methyluridine-3'-phosphorothioate
  modified_base 23: mod_base = OTHER; note = 2'-O-methylcytidine-3'-phosphate
aactctgtgggctctctctcatc

SEQ ID NO: 3493 - RNA, 23 nt, synthetic construct
  source 1..23: mol_type = other RNA
  modified_base 1: mod_base = OTHER; note = 2'-O-methyladenosine-3'-phosphorothioate
  modified_base 2: mod_base = OTHER; note = 2'-fluoroadenosine-3'-phosphorothioate
  modified_base 3: mod_base = OTHER; note = 2'-O-methylguanosine-3'-phosphate
  modified_base 4: mod_base = OTHER; note = 2'-O-methyladenosine-3'-phosphate
  modified_base 5: mod_base = OTHER; note = 2'-O-methylcytidine-3'-phosphate
  modified_base 6: mod_base = OTHER; note = 2'-fluorouridine-3'-phosphate
  modified_base 7: mod_base = OTHER; note = 2'-O-methylcytidine-3'-phosphate
  modified_base 8: mod_base = OTHER; note = 2'-fluorouridine-3'-phosphate
  modified_base 9: mod_base = OTHER; note = 2'-fluoroguanosine-3'-phosphate
  modified_base 10: mod_base = OTHER; note = 2'-O-methyluridine-3'-phosphate
  modified_base 11: mod_base = OTHER; note = 2'-O-methylguanosine-3'-phosphate
  modified_base 12: mod_base = OTHER; note = 2'-O-methylguanosine-3'-phosphate
  modified_base 13: mod_base = OTHER; note = 2'-O-methylguanosine-3'-phosphate
  modified_base 14: mod_base = OTHER; note = 2'-fluorocytidine-3'-phosphate
  modified_base 15: mod_base = OTHER; note = 2'-O-methyluridine-3'-phosphate
  modified_base 16: mod_base = OTHER; note = 2'-fluorocytidine-3'-phosphate
  modified_base 17: mod_base = OTHER; note = 2'-O-methyluridine-3'-phosphate
  modified_base 18: mod_base = OTHER; note = 2'-O-methylcytidine-3'-phosphate
  modified_base 19: mod_base = OTHER; note = 2'-O-methyluridine-3'-phosphate
  modified_base 20: mod_base = OTHER; note = 2'-O-methylcytidine-3'-phosphate
  modified_base 21: mod_base = OTHER; note = 2'-O-methyluridine-3'-phosphorothioate
  modified_base 22: mod_base = OTHER; note = 2'-O-methylcytidine-3'-phosphorothioate
  modified_base 23: mod_base = OTHER; note = 2'-O-methyladenosine-3'-phosphate
aagactctgtgggctctctctca

SEQ ID NO: 3494 - RNA, 23 nt, synthetic construct
  source 1..23: mol_type = other RNA
  modified_base 1: mod_base = OTHER; note = 2'-O-methyladenosine-3'-phosphorothioate
  modified_base 2: mod_base = OTHER; note = 2'-fluorouridine -3'-phosphorothioate
  modified_base 3: mod_base = OTHER; note = 2'-O-methyladenosine-3'-phosphate
  modified_base 4: mod_base = OTHER; note = 2'-O-methylguanosine-3'-phosphate
  modified_base 5: mod_base = OTHER; note = 2'-O-methyladenosine-3'-phosphate
  modified_base 6: mod_base = OTHER; note = 2'-fluorocytidine-3'-phosphate
  modified_base 7: mod_base = OTHER; note = 2'-O-methyluridine-3'-phosphate
  modified_base 8: mod_base = OTHER; note = 2'-fluorocytidine-3'-phosphate
  modified_base 9: mod_base = OTHER; note = 2'-fluorouridine-3'-phosphate
  modified_base 10: mod_base = OTHER; note = 2'-O-methylguanosine-3'-phosphate
  modified_base 11: mod_base = OTHER; note = 2'-O-methyluridine-3'-phosphate
  modified_base 12: mod_base = OTHER; note = 2'-O-methylguanosine-3'-phosphate
  modified_base 13: mod_base = OTHER; note = 2'-O-methylguanosine-3'-phosphate
  modified_base 14: mod_base = OTHER; note = 2'-fluoroguanosine-3'-phosphate
  modified_base 15: mod_base = OTHER; note = 2'-O-methylcytidine-3'-phosphate
  modified_base 16: mod_base = OTHER; note = 2'-fluorouridine-3'-phosphate
  modified_base 17: mod_base = OTHER; note = 2'-O-methylcytidine-3'-phosphate
  modified_base 18: mod_base = OTHER; note = 2'-O-methyluridine-3'-phosphate
  modified_base 19: mod_base = OTHER; note = 2'-O-methylcytidine-3'-phosphate
  modified_base 20: mod_base = OTHER; note = 2'-O-methyluridine-3'-phosphate
  modified_base 21: mod_base = OTHER; note = 2'-O-methylcytidine-3'-phosphorothioate
  modified_base 22: mod_base = OTHER; note = 2'-O-methyluridine-3'-phosphorothioate
  modified_base 23: mod_base = OTHER; note = 2'-O-methylcytidine-3'-phosphate
atagactctgtgggctctctctc

SEQ ID NO: 3495 - RNA, 23 nt, synthetic construct
  source 1..23: mol_type = other RNA
  modified_base 1: mod_base = OTHER; note = 2'-O-methyladenosine-3'-phosphorothioate
  modified_base 2: mod_base = OTHER; note = 2'-fluorocytidine-3'-phosphorothioate
  modified_base 3: mod_base = OTHER; note = 2'-O-methyladenosine-3'-phosphate
  modified_base 4: mod_base = OTHER; note = 2'-O-methyladenosine-3'-phosphate
  modified_base 5: mod_base = OTHER; note = 2'-O-methyladenosine-3'-phosphate
  modified_base 6: mod_base = OTHER; note = 2'-fluorocytidine-3'-phosphate
  modified_base 7: mod_base = OTHER; note = 2'-O-methyladenosine-3'-phosphate
  modified_base 8: mod_base = OTHER; note = 2'-fluoroguanosine-3'-phosphate
  modified_base 9: mod_base = OTHER; note = 2'-fluoroguanosine-3'-phosphate
  modified_base 10: mod_base = OTHER; note = 2'-O-methyladenosine-3'-phosphate
  modified_base 11: mod_base = OTHER; note = 2'-O-methyladenosine-3'-phosphate
  modified_base 12: mod_base = OTHER; note = 2'-O-methyluridine-3'-phosphate
  modified_base 13: mod_base = OTHER; note = 2'-O-methylguanosine-3'-phosphate
  modified_base 14: mod_base = OTHER; note = 2'-fluoroguanosine-3'-phosphate
  modified_base 15: mod_base = OTHER; note = 2'-O-methylguanosine-3'-phosphate
  modified_base 16: mod_base = OTHER; note = 2'-fluorocytidine-3'-phosphate
  modified_base 17: mod_base = OTHER; note = 2'-O-methylguanosine-3'-phosphate
  modified_base 18: mod_base = OTHER; note = 2'-O-methylguanosine-3'-phosphate
  modified_base 19: mod_base = OTHER; note = 2'-O-methyluridine-3'-phosphate
  modified_base 20: mod_base = OTHER; note = 2'-O-methyluridine-3'-phosphate
  modified_base 21: mod_base = OTHER; note = 2'-O-methylcytidine-3'-phosphorothioate
  modified_base 22: mod_base = OTHER; note = 2'-O-methyladenosine-3'-phosphorothioate
  modified_base 23: mod_base = OTHER; note = 2'-O-methylguanosine-3'-phosphate
acaaacaggaatgggcggttcag

SEQ ID NO: 3496 - RNA, 23 nt, synthetic construct
  source 1..23: mol_type = other RNA
  modified_base 1: mod_base = OTHER; note = 2'-O-methyladenosine-3'-phosphorothioate
  modified_base 2: mod_base = OTHER; note = 2'-fluorocytidine-3'-phosphorothioate
  modified_base 3: mod_base = OTHER; note = 2'-O-methyladenosine-3'-phosphate
  modified_base 4: mod_base = OTHER; note = 2'-O-methylcytidine-3'-phosphate
  modified_base 5: mod_base = OTHER; note = 2'-O-methyladenosine-3'-phosphate
  modified_base 6: mod_base = OTHER; note = 2'-fluoroguanosine-3'-phosphate
  modified_base 7: mod_base = OTHER; note = 2'-O-methylcytidine-3'-phosphate
  modified_base 8: mod_base = OTHER; note = 2'-fluoroadenosine-3'-phosphate
  modified_base 9: mod_base = OTHER; note = 2'-fluoroadenosine-3'-phosphate
  modified_base 10: mod_base = OTHER; note = 2'-O-methyladenosine-3'-phosphate
  modified_base 11: mod_base = OTHER; note = 2'-O-methylcytidine-3'-phosphate
  modified_base 12: mod_base = OTHER; note = 2'-O-methyladenosine-3'-phosphate
  modified_base 13: mod_base = OTHER; note = 2'-O-methylguanosine-3'-phosphate
  modified_base 14: mod_base = OTHER; note = 2'-fluoroguanosine-3'-phosphate
  modified_base 15: mod_base = OTHER; note = 2'-O-methyladenosine-3'-phosphate
  modified_base 16: mod_base = OTHER; note = 2'-fluoroadenosine-3'-phosphate
  modified_base 17: mod_base = OTHER; note = 2'-O-methyluridine-3'-phosphate
  modified_base 18: mod_base = OTHER; note = 2'-O-methylguanosine-3'-phosphate
  modified_base 19: mod_base = OTHER; note = 2'-O-methylguanosine-3'-phosphate
  modified_base 20: mod_base = OTHER; note = 2'-O-methylguanosine-3'-phosphate
  modified_base 21: mod_base = OTHER; note = 2'-O-methylcytidine-3'-phosphorothioate
  modified_base 22: mod_base = OTHER; note = 2'-O-methylguanosine-3'-phosphorothioate
  modified_base 23: mod_base = OTHER; note = 2'-O-methylguanosine-3'-phosphate
acacagcaaacaggaatgggcgg

SEQ ID NO: 3497 - RNA, 23 nt, synthetic construct
  source 1..23: mol_type = other RNA
  modified_base 1: mod_base = OTHER; note = 2'-O-methyladenosine-3'-phosphorothioate
  modified_base 2: mod_base = OTHER; note = 2'-fluoroadenosine-3'-phosphorothioate
  modified_base 3: mod_base = OTHER; note = 2'-O-methylcytidine-3'-phosphate
  modified_base 4: mod_base = OTHER; note = 2'-O-methyladenosine-3'-phosphate
  modified_base 5: mod_base = OTHER; note = 2'-O-methylcytidine-3'-phosphate
  modified_base 6: mod_base = OTHER; note = 2'-fluoroadenosine-3'-phosphate
  modified_base 7: mod_base = OTHER; note = 2'-O-methylguanosine-3'-phosphate
  modified_base 8: mod_base = OTHER; note = 2'-fluorocytidine-3'-phosphate
  modified_base 9: mod_base = OTHER; note = 2'-fluoroadenosine-3'-phosphate
  modified_base 10: mod_base = OTHER; note = 2'-O-methyladenosine-3'-phosphate
  modified_base 11: mod_base = OTHER; note = 2'-O-methyladenosine-3'-phosphate
  modified_base 12: mod_base = OTHER; note = 2'-O-methylcytidine-3'-phosphate
  modified_base 13: mod_base = OTHER; note = 2'-O-methyladenosine-3'-phosphate
  modified_base 14: mod_base = OTHER; note = 2'-fluoroguanosine-3'-phosphate
  modified_base 15: mod_base = OTHER; note = 2'-O-methylguanosine-3'-phosphate
  modified_base 16: mod_base = OTHER; note = 2'-fluoroadenosine-3'-phosphate
  modified_base 17: mod_base = OTHER; note = 2'-O-methyladenosine-3'-phosphate
  modified_base 18: mod_base = OTHER; note = 2'-O-methyluridine-3'-phosphate
  modified_base 19: mod_base = OTHER; note = 2'-O-methylguanosine-3'-phosphate
  modified_base 20: mod_base = OTHER; note = 2'-O-methylguanosine-3'-phosphate
  modified_base 21: mod_base = OTHER; note = 2'-O-methylguanosine-3'-phosphorothioate
  modified_base 22: mod_base = OTHER; note = 2'-O-methylcytidine-3'-phosphorothioate
  modified_base 23: mod_base = OTHER; note = 2'-O-methylguanosine-3'-phosphate
aacacagcaaacaggaatgggcg

SEQ ID NO: 3498 - RNA, 23 nt, synthetic construct
  source 1..23: mol_type = other RNA
  modified_base 1: mod_base = OTHER; note = 2'-O-methyladenosine-3'-phosphorothioate
  modified_base 2: mod_base = OTHER; note = 2'-fluoroadenosine-3'-phosphorothioate
  modified_base 3: mod_base = OTHER; note = 2'-O-methyluridine-3'-phosphate
  modified_base 4: mod_base = OTHER; note = 2'-O-methyladenosine-3'-phosphate
  modified_base 5: mod_base = OTHER; note = 2'-O-methylcytidine-3'-phosphate
  modified_base 6: mod_base = OTHER; note = 2'-fluoroadenosine-3'-phosphate
  modified_base 7: mod_base = OTHER; note = 2'-O-methylcytidine-3'-phosphate
  modified_base 8: mod_base = OTHER; note = 2'-fluoroadenosine-3'-phosphate
  modified_base 9: mod_base = OTHER; note = 2'-fluoroguanosine-3'-phosphate
  modified_base 10: mod_base = OTHER; note = 2'-O-methylcytidine-3'-phosphate
  modified_base 11: mod_base = OTHER; note = 2'-O-methyladenosine-3'-phosphate
  modified_base 12: mod_base = OTHER; note = 2'-O-methyladenosine-3'-phosphate
  modified_base 13: mod_base = OTHER; note = 2'-O-methyladenosine-3'-phosphate
  modified_base 14: mod_base = OTHER; note = 2'-fluorocytidine-3'-phosphate
  modified_base 15: mod_base = OTHER; note = 2'-O-methyladenosine-3'-phosphate
  modified_base 16: mod_base = OTHER; note = 2'-fluoroguanosine-3'-phosphate
  modified_base 17: mod_base = OTHER; note = 2'-O-methylguanosine-3'-phosphate
  modified_base 18: mod_base = OTHER; note = 2'-O-methyladenosine-3'-phosphate
  modified_base 19: mod_base = OTHER; note = 2'-O-methyladenosine-3'-phosphate
  modified_base 20: mod_base = OTHER; note = 2'-O-methyluridine-3'-phosphate
  modified_base 21: mod_base = OTHER; note = 2'-O-methylguanosine-3'-phosphorothioate
  modified_base 22: mod_base = OTHER; note = 2'-O-methylguanosine-3'-phosphorothioate
  modified_base 23: mod_base = OTHER; note = 2'-O-methylguanosine-3'-phosphate
aatacacagcaaacaggaatggg

SEQ ID NO: 3499 - RNA, 23 nt, synthetic construct
  source 1..23: mol_type = other RNA
  modified_base 1: mod_base = OTHER; note = 2'-O-methyladenosine-3'-phosphorothioate
  modified_base 2: mod_base = OTHER; note = 2'-fluorouridine -3'-phosphorothioate
  modified_base 3: mod_base = OTHER; note = 2'-O-methylcytidine-3'-phosphate
  modified_base 4: mod_base = OTHER; note = 2'-O-methyladenosine-3'-phosphate
  modified_base 5: mod_base = OTHER; note = 2'-O-methyluridine-3'-phosphate
  modified_base 6: mod_base = OTHER; note = 2'-fluoroadenosine-3'-phosphate
  modified_base 7: mod_base = OTHER; note = 2'-O-methylcytidine-3'-phosphate
  modified_base 8: mod_base = OTHER; note = 2'-fluoroadenosine-3'-phosphate
  modified_base 9: mod_base = OTHER; note = 2'-fluorocytidine-3'-phosphate
  modified_base 10: mod_base = OTHER; note = 2'-O-methyladenosine-3'-phosphate
  modified_base 11: mod_base = OTHER; note = 2'-O-methylguanosine-3'-phosphate
  modified_base 12: mod_base = OTHER; note = 2'-O-methylcytidine-3'-phosphate
  modified_base 13: mod_base = OTHER; note = 2'-O-methyladenosine-3'-phosphate
  modified_base 14: mod_base = OTHER; note = 2'-fluoroadenosine-3'-phosphate
  modified_base 15: mod_base = OTHER; note = 2'-O-methyladenosine-3'-phosphate
  modified_base 16: mod_base = OTHER; note = 2'-fluorocytidine-3'-phosphate
  modified_base 17: mod_base = OTHER; note = 2'-O-methyladenosine-3'-phosphate
  modified_base 18: mod_base = OTHER; note = 2'-O-methylguanosine-3'-phosphate
  modified_base 19: mod_base = OTHER; note = 2'-O-methylguanosine-3'-phosphate
  modified_base 20: mod_base = OTHER; note = 2'-O-methyladenosine-3'-phosphate
  modified_base 21: mod_base = OTHER; note = 2'-O-methyladenosine-3'-phosphorothioate
  modified_base 22: mod_base = OTHER; note = 2'-O-methyluridine-3'-phosphorothioate
  modified_base 23: mod_base = OTHER; note = 2'-O-methylguanosine-3'-phosphate
atcatacacagcaaacaggaatg

SEQ ID NO: 3500 - RNA, 23 nt, synthetic construct
  source 1..23: mol_type = other RNA
  modified_base 1: mod_base = OTHER; note = 2'-O-methyladenosine-3'-phosphorothioate
  modified_base 2: mod_base = OTHER; note = 2'-fluoroguanosine-3'-phosphorothioate
  modified_base 3: mod_base = OTHER; note = 2'-O-methyladenosine-3'-phosphate
  modified_base 4: mod_base = OTHER; note = 2'-O-methyluridine-3'-phosphate
  modified_base 5: mod_base = OTHER; note = 2'-O-methylcytidine-3'-phosphate
  modified_base 6: mod_base = OTHER; note = 2'-fluoroadenosine-3'-phosphate
  modified_base 7: mod_base = OTHER; note = 2'-O-methyluridine-3'-phosphate
  modified_base 8: mod_base = OTHER; note = 2'-fluoroadenosine-3'-phosphate
  modified_base 9: mod_base = OTHER; note = 2'-fluorocytidine-3'-phosphate
  modified_base 10: mod_base = OTHER; note = 2'-O-methyladenosine-3'-phosphate
  modified_base 11: mod_base = OTHER; note = 2'-O-methylcytidine-3'-phosphate
  modified_base 12: mod_base = OTHER; note = 2'-O-methyladenosine-3'-phosphate
  modified_base 13: mod_base = OTHER; note = 2'-O-methylguanosine-3'-phosphate
  modified_base 14: mod_base = OTHER; note = 2'-fluorocytidine-3'-phosphate
  modified_base 15: mod_base = OTHER; note = 2'-O-methyladenosine-3'-phosphate
  modified_base 16: mod_base = OTHER; note = 2'-fluoroadenosine-3'-phosphate
  modified_base 17: mod_base = OTHER; note = 2'-O-methyladenosine-3'-phosphate
  modified_base 18: mod_base = OTHER; note = 2'-O-methylcytidine-3'-phosphate
  modified_base 19: mod_base = OTHER; note = 2'-O-methyladenosine-3'-phosphate
  modified_base 20: mod_base = OTHER; note = 2'-O-methylguanosine-3'-phosphate
  modified_base 21: mod_base = OTHER; note = 2'-O-methylguanosine-3'-phosphorothioate
  modified_base 22: mod_base = OTHER; note = 2'-O-methyladenosine-3'-phosphorothioate
  modified_base 23: mod_base = OTHER; note = 2'-O-methyladenosine-3'-phosphate
agatcatacacagcaaacaggaa

SEQ ID NO: 3501 - RNA, 23 nt, synthetic construct
  source 1..23: mol_type = other RNA
  modified_base 1: mod_base = OTHER; note = 2'-O-methyladenosine-3'-phosphorothioate
  modified_base 2: mod_base = OTHER; note = 2'-fluorouridine -3'-phosphorothioate
  modified_base 3: mod_base = OTHER; note = 2'-O-methylguanosine-3'-phosphate
  modified_base 4: mod_base = OTHER; note = 2'-O-methyladenosine-3'-phosphate
  modified_base 5: mod_base = OTHER; note = 2'-O-methyluridine-3'-phosphate
  modified_base 6: mod_base = OTHER; note = 2'-fluorocytidine-3'-phosphate
  modified_base 7: mod_base = OTHER; note = 2'-O-methyladenosine-3'-phosphate
  modified_base 8: mod_base = OTHER; note = 2'-fluorouridine-3'-phosphate
  modified_base 9: mod_base = OTHER; note = 2'-fluoroadenosine-3'-phosphate
  modified_base 10: mod_base = OTHER; note = 2'-O-methylcytidine-3'-phosphate
  modified_base 11: mod_base = OTHER; note = 2'-O-methyladenosine-3'-phosphate
  modified_base 12: mod_base = OTHER; note = 2'-O-methylcytidine-3'-phosphate
  modified_base 13: mod_base = OTHER; note = 2'-O-methyladenosine-3'-phosphate
  modified_base 14: mod_base = OTHER; note = 2'-fluoroguanosine-3'-phosphate
  modified_base 15: mod_base = OTHER; note = 2'-O-methylcytidine-3'-phosphate
  modified_base 16: mod_base = OTHER; note = 2'-fluoroadenosine-3'-phosphate
  modified_base 17: mod_base = OTHER; note = 2'-O-methyladenosine-3'-phosphate
  modified_base 18: mod_base = OTHER; note = 2'-O-methyladenosine-3'-phosphate
  modified_base 19: mod_base = OTHER; note = 2'-O-methylcytidine-3'-phosphate
  modified_base 20: mod_base = OTHER; note = 2'-O-methyladenosine-3'-phosphate
  modified_base 21: mod_base = OTHER; note = 2'-O-methylguanosine-3'-phosphorothioate
  modified_base 22: mod_base = OTHER; note = 2'-O-methylguanosine-3'-phosphorothioate
  modified_base 23: mod_base = OTHER; note = 2'-O-methyladenosine-3'-phosphate
atgatcatacacagcaaacagga

SEQ ID NO: 3502 - RNA, 23 nt, synthetic construct
  source 1..23: mol_type = other RNA
  modified_base 1: mod_base = OTHER; note = 2'-O-methyladenosine-3'-phosphorothioate
  modified_base 2: mod_base = OTHER; note = 2'-fluorouridine -3'-phosphorothioate
  modified_base 3: mod_base = OTHER; note = 2'-O-methyluridine-3'-phosphate
  modified_base 4: mod_base = OTHER; note = 2'-O-methylguanosine-3'-phosphate
  modified_base 5: mod_base = OTHER; note = 2'-O-methyladenosine-3'-phosphate
  modified_base 6: mod_base = OTHER; note = 2'-fluorouridine-3'-phosphate
  modified_base 7: mod_base = OTHER; note = 2'-O-methylcytidine-3'-phosphate
  modified_base 8: mod_base = OTHER; note = 2'-fluoroadenosine-3'-phosphate
  modified_base 9: mod_base = OTHER; note = 2'-fluorouridine-3'-phosphate
  modified_base 10: mod_base = OTHER; note = 2'-O-methyladenosine-3'-phosphate
  modified_base 11: mod_base = OTHER; note = 2'-O-methylcytidine-3'-phosphate
  modified_base 12: mod_base = OTHER; note = 2'-O-methyladenosine-3'-phosphate
  modified_base 13: mod_base = OTHER; note = 2'-O-methylcytidine-3'-phosphate
  modified_base 14: mod_base = OTHER; note = 2'-fluoroadenosine-3'-phosphate
  modified_base 15: mod_base = OTHER; note = 2'-O-methylguanosine-3'-phosphate
  modified_base 16: mod_base = OTHER; note = 2'-fluorocytidine-3'-phosphate
  modified_base 17: mod_base = OTHER; note = 2'-O-methyladenosine-3'-phosphate
  modified_base 18: mod_base = OTHER; note = 2'-O-methyladenosine-3'-phosphate
  modified_base 19: mod_base = OTHER; note = 2'-O-methyladenosine-3'-phosphate
  modified_base 20: mod_base = OTHER; note = 2'-O-methylcytidine-3'-phosphate
  modified_base 21: mod_base = OTHER; note = 2'-O-methyladenosine-3'-phosphorothioate
  modified_base 22: mod_base = OTHER; note = 2'-O-methylguanosine-3'-phosphorothioate
  modified_base 23: mod_base = OTHER; note = 2'-O-methylguanosine-3'-phosphate
attgatcatacacagcaaacagg

SEQ ID NO: 3503 - RNA, 23 nt, synthetic construct
  source 1..23: mol_type = other RNA
  modified_base 1: mod_base = OTHER; note = 2'-O-methyladenosine-3'-phosphorothioate
  modified_base 2: mod_base = OTHER; note = 2'-fluorouridine -3'-phosphorothioate
  modified_base 3: mod_base = OTHER; note = 2'-O-methyluridine-3'-phosphate
  modified_base 4: mod_base = OTHER; note = 2'-O-methyluridine-3'-phosphate
  modified_base 5: mod_base = OTHER; note = 2'-O-methylguanosine-3'-phosphate
  modified_base 6: mod_base = OTHER; note = 2'-fluoroadenosine-3'-phosphate
  modified_base 7: mod_base = OTHER; note = 2'-O-methyluridine-3'-phosphate
  modified_base 8: mod_base = OTHER; note = 2'-fluorocytidine-3'-phosphate
  modified_base 9: mod_base = OTHER; note = 2'-fluoroadenosine-3'-phosphate
  modified_base 10: mod_base = OTHER; note = 2'-O-methyluridine-3'-phosphate
  modified_base 11: mod_base = OTHER; note = 2'-O-methyladenosine-3'-phosphate
  modified_base 12: mod_base = OTHER; note = 2'-O-methylcytidine-3'-phosphate
  modified_base 13: mod_base = OTHER; note = 2'-O-methyladenosine-3'-phosphate
  modified_base 14: mod_base = OTHER; note = 2'-fluorocytidine-3'-phosphate
  modified_base 15: mod_base = OTHER; note = 2'-O-methyladenosine-3'-phosphate
  modified_base 16: mod_base = OTHER; note = 2'-fluoroguanosine-3'-phosphate
  modified_base 17: mod_base = OTHER; note = 2'-O-methylcytidine-3'-phosphate
  modified_base 18: mod_base = OTHER; note = 2'-O-methyladenosine-3'-phosphate
  modified_base 19: mod_base = OTHER; note = 2'-O-methyladenosine-3'-phosphate
  modified_base 20: mod_base = OTHER; note = 2'-O-methyladenosine-3'-phosphate
  modified_base 21: mod_base = OTHER; note = 2'-O-methylcytidine-3'-phosphorothioate
  modified_base 22: mod_base = OTHER; note = 2'-O-methyladenosine-3'-phosphorothioate
  modified_base 23: mod_base = OTHER; note = 2'-O-methylguanosine-3'-phosphate
atttgatcatacacagcaaacag

SEQ ID NO: 3504 - RNA, 23 nt, synthetic construct
  source 1..23: mol_type = other RNA
  modified_base 1: mod_base = OTHER; note = 2'-O-methyladenosine-3'-phosphorothioate
  modified_base 2: mod_base = OTHER; note = 2'-fluorocytidine-3'-phosphorothioate
  modified_base 3: mod_base = OTHER; note = 2'-O-methyluridine-3'-phosphate
  modified_base 4: mod_base = OTHER; note = 2'-O-methyluridine-3'-phosphate
  modified_base 5: mod_base = OTHER; note = 2'-O-methyluridine-3'-phosphate
  modified_base 6: mod_base = OTHER; note = 2'-fluoroguanosine-3'-phosphate
  modified_base 7: mod_base = OTHER; note = 2'-O-methyladenosine-3'-phosphate
  modified_base 8: mod_base = OTHER; note = 2'-fluorouridine-3'-phosphate
  modified_base 9: mod_base = OTHER; note = 2'-fluorocytidine-3'-phosphate
  modified_base 10: mod_base = OTHER; note = 2'-O-methyladenosine-3'-phosphate
  modified_base 11: mod_base = OTHER; note = 2'-O-methyluridine-3'-phosphate
  modified_base 12: mod_base = OTHER; note = 2'-O-methyladenosine-3'-phosphate
  modified_base 13: mod_base = OTHER; note = 2'-O-methylcytidine-3'-phosphate
  modified_base 14: mod_base = OTHER; note = 2'-fluoroadenosine-3'-phosphate
  modified_base 15: mod_base = OTHER; note = 2'-O-methylcytidine-3'-phosphate
  modified_base 16: mod_base = OTHER; note = 2'-fluoroadenosine-3'-phosphate
  modified_base 17: mod_base = OTHER; note = 2'-O-methylguanosine-3'-phosphate
  modified_base 18: mod_base = OTHER; note = 2'-O-methylcytidine-3'-phosphate
  modified_base 19: mod_base = OTHER; note = 2'-O-methyladenosine-3'-phosphate
  modified_base 20: mod_base = OTHER; note = 2'-O-methyladenosine-3'-phosphate
  modified_base 21: mod_base = OTHER; note = 2'-O-methyladenosine-3'-phosphorothioate
  modified_base 22: mod_base = OTHER; note = 2'-O-methylcytidine-3'-phosphorothioate
  modified_base 23: mod_base = OTHER; note = 2'-O-methyladenosine-3'-phosphate
actttgatcatacacagcaaaca

SEQ ID NO: 3505 - RNA, 23 nt, synthetic construct
  source 1..23: mol_type = other RNA
  modified_base 1: mod_base = OTHER; note = 2'-O-methyladenosine-3'-phosphorothioate
  modified_base 2: mod_base = OTHER; note = 2'-fluorouridine -3'-phosphorothioate
  modified_base 3: mod_base = OTHER; note = 2'-O-methyladenosine-3'-phosphate
  modified_base 4: mod_base = OTHER; note = 2'-O-methylguanosine-3'-phosphate
  modified_base 5: mod_base = OTHER; note = 2'-O-methyladenosine-3'-phosphate
  modified_base 6: mod_base = OTHER; note = 2'-fluoroadenosine-3'-phosphate
  modified_base 7: mod_base = OTHER; note = 2'-O-methylguanosine-3'-phosphate
  modified_base 8: mod_base = OTHER; note = 2'-fluoroadenosine-3'-phosphate
  modified_base 9: mod_base = OTHER; note = 2'-fluoroadenosine-3'-phosphate
  modified_base 10: mod_base = OTHER; note = 2'-O-methyladenosine-3'-phosphate
  modified_base 11: mod_base = OTHER; note = 2'-O-methyladenosine-3'-phosphate
  modified_base 12: mod_base = OTHER; note = 2'-O-methylguanosine-3'-phosphate
  modified_base 13: mod_base = OTHER; note = 2'-O-methylguanosine-3'-phosphate
  modified_base 14: mod_base = OTHER; note = 2'-fluorouridine-3'-phosphate
  modified_base 15: mod_base = OTHER; note = 2'-O-methylguanosine-3'-phosphate
  modified_base 16: mod_base = OTHER; note = 2'-fluoroguanosine-3'-phosphate
  modified_base 17: mod_base = OTHER; note = 2'-O-methylguanosine-3'-phosphate
  modified_base 18: mod_base = OTHER; note = 2'-O-methyladenosine-3'-phosphate
  modified_base 19: mod_base = OTHER; note = 2'-O-methylguanosine-3'-phosphate
  modified_base 20: mod_base = OTHER; note = 2'-O-methyladenosine-3'-phosphate
  modified_base 21: mod_base = OTHER; note = 2'-O-methylcytidine-3'-phosphorothioate
  modified_base 22: mod_base = OTHER; note = 2'-O-methyluridine-3'-phosphorothioate
  modified_base 23: mod_base = OTHER; note = 2'-O-methylguanosine-3'-phosphate
atagaagaaaaggtgggagactg

SEQ ID NO: 3506 - RNA, 23 nt, synthetic construct
  source 1..23: mol_type = other RNA
  modified_base 1: mod_base = OTHER; note = 2'-O-methyladenosine-3'-phosphorothioate
  modified_base 2: mod_base = OTHER; note = 2'-fluoroadenosine-3'-phosphorothioate
  modified_base 3: mod_base = OTHER; note = 2'-O-methylcytidine-3'-phosphate
  modified_base 4: mod_base = OTHER; note = 2'-O-methyluridine-3'-phosphate
  modified_base 5: mod_base = OTHER; note = 2'-O-methylcytidine-3'-phosphate
  modified_base 6: mod_base = OTHER; note = 2'-fluoroadenosine-3'-phosphate
  modified_base 7: mod_base = OTHER; note = 2'-O-methyluridine-3'-phosphate
  modified_base 8: mod_base = OTHER; note = 2'-fluorouridine-3'-phosphate
  modified_base 9: mod_base = OTHER; note = 2'-fluoroadenosine-3'-phosphate
  modified_base 10: mod_base = OTHER; note = 2'-O-methylguanosine-3'-phosphate
  modified_base 11: mod_base = OTHER; note = 2'-O-methyladenosine-3'-phosphate
  modified_base 12: mod_base = OTHER; note = 2'-O-methyladenosine-3'-phosphate
  modified_base 13: mod_base = OTHER; note = 2'-O-methylguanosine-3'-phosphate
  modified_base 14: mod_base = OTHER; note = 2'-fluoroadenosine-3'-phosphate
  modified_base 15: mod_base = OTHER; note = 2'-O-methyladenosine-3'-phosphate
  modified_base 16: mod_base = OTHER; note = 2'-fluoroadenosine-3'-phosphate
  modified_base 17: mod_base = OTHER; note = 2'-O-methyladenosine-3'-phosphate
  modified_base 18: mod_base = OTHER; note = 2'-O-methylguanosine-3'-phosphate
  modified_base 19: mod_base = OTHER; note = 2'-O-methylguanosine-3'-phosphate
  modified_base 20: mod_base = OTHER; note = 2'-O-methyluridine-3'-phosphate
  modified_base 21: mod_base = OTHER; note = 2'-O-methylguanosine-3'-phosphorothioate
  modified_base 22: mod_base = OTHER; note = 2'-O-methylguanosine-3'-phosphorothioate
  modified_base 23: mod_base = OTHER; note = 2'-O-methylguanosine-3'-phosphate
aactcattagaagaaaaggtggg

SEQ ID NO: 3507 - RNA, 23 nt, synthetic construct
  source 1..23: mol_type = other RNA
  modified_base 1: mod_base = OTHER; note = 2'-O-methyladenosine-3'-phosphorothioate
  modified_base 2: mod_base = OTHER; note = 2'-fluoroguanosine-3'-phosphorothioate
  modified_base 3: mod_base = OTHER; note = 2'-O-methyladenosine-3'-phosphate
  modified_base 4: mod_base = OTHER; note = 2'-O-methylcytidine-3'-phosphate
  modified_base 5: mod_base = OTHER; note = 2'-O-methyluridine-3'-phosphate
  modified_base 6: mod_base = OTHER; note = 2'-fluorocytidine-3'-phosphate
  modified_base 7: mod_base = OTHER; note = 2'-O-methyladenosine-3'-phosphate
  modified_base 8: mod_base = OTHER; note = 2'-fluorouridine-3'-phosphate
  modified_base 9: mod_base = OTHER; note = 2'-fluorouridine-3'-phosphate
  modified_base 10: mod_base = OTHER; note = 2'-O-methyladenosine-3'-phosphate
  modified_base 11: mod_base = OTHER; note = 2'-O-methylguanosine-3'-phosphate
  modified_base 12: mod_base = OTHER; note = 2'-O-methyladenosine-3'-phosphate
  modified_base 13: mod_base = OTHER; note = 2'-O-methyladenosine-3'-phosphate
  modified_base 14: mod_base = OTHER; note = 2'-fluoroguanosine-3'-phosphate
  modified_base 15: mod_base = OTHER; note = 2'-O-methyladenosine-3'-phosphate
  modified_base 16: mod_base = OTHER; note = 2'-fluoroadenosine-3'-phosphate
  modified_base 17: mod_base = OTHER; note = 2'-O-methyladenosine-3'-phosphate
  modified_base 18: mod_base = OTHER; note = 2'-O-methyladenosine-3'-phosphate
  modified_base 19: mod_base = OTHER; note = 2'-O-methylguanosine-3'-phosphate
  modified_base 20: mod_base = OTHER; note = 2'-O-methylguanosine-3'-phosphate
  modified_base 21: mod_base = OTHER; note = 2'-O-methyluridine-3'-phosphorothioate
  modified_base 22: mod_base = OTHER; note = 2'-O-methylguanosine-3'-phosphorothioate
  modified_base 23: mod_base = OTHER; note = 2'-O-methylguanosine-3'-phosphate
agactcattagaagaaaaggtgg

SEQ ID NO: 3508 - RNA, 23 nt, synthetic construct
  source 1..23: mol_type = other RNA
  modified_base 1: mod_base = OTHER; note = 2'-O-methyladenosine-3'-phosphorothioate
  modified_base 2: mod_base = OTHER; note = 2'-fluorocytidine-3'-phosphorothioate
  modified_base 3: mod_base = OTHER; note = 2'-O-methyluridine-3'-phosphate
  modified_base 4: mod_base = OTHER; note = 2'-O-methyluridine-3'-phosphate
  modified_base 5: mod_base = OTHER; note = 2'-O-methyladenosine-3'-phosphate
  modified_base 6: mod_base = OTHER; note = 2'-fluoroguanosine-3'-phosphate
  modified_base 7: mod_base = OTHER; note = 2'-O-methyladenosine-3'-phosphate
  modified_base 8: mod_base = OTHER; note = 2'-fluorocytidine-3'-phosphate
  modified_base 9: mod_base = OTHER; note = 2'-fluorocytidine-3'-phosphate
  modified_base 10: mod_base = OTHER; note = 2'-O-methyladenosine-3'-phosphate
  modified_base 11: mod_base = OTHER; note = 2'-O-methyladenosine-3'-phosphate
  modified_base 12: mod_base = OTHER; note = 2'-O-methylguanosine-3'-phosphate
  modified_base 13: mod_base = OTHER; note = 2'-O-methylguanosine-3'-phosphate
  modified_base 14: mod_base = OTHER; note = 2'-fluoroadenosine-3'-phosphate
  modified_base 15: mod_base = OTHER; note = 2'-O-methylguanosine-3'-phosphate
  modified_base 16: mod_base = OTHER; note = 2'-fluoroadenosine-3'-phosphate
  modified_base 17: mod_base = OTHER; note = 2'-O-methyladenosine-3'-phosphate
  modified_base 18: mod_base = OTHER; note = 2'-O-methyladenosine-3'-phosphate
  modified_base 19: mod_base = OTHER; note = 2'-O-methylcytidine-3'-phosphate
  modified_base 20: mod_base = OTHER; note = 2'-O-methylguanosine-3'-phosphate
  modified_base 21: mod_base = OTHER; note = 2'-O-methylguanosine-3'-phosphorothioate
  modified_base 22: mod_base = OTHER; note = 2'-O-methylcytidine-3'-phosphorothioate
  modified_base 23: mod_base = OTHER; note = 2'-O-methyluridine-3'-phosphate
acttagaccaaggagaaacggct

SEQ ID NO: 3509 - RNA, 23 nt, synthetic construct
  source 1..23: mol_type = other RNA
  modified_base 1: mod_base = OTHER; note = 2'-O-methyladenosine-3'-phosphorothioate
  modified_base 2: mod_base = OTHER; note = 2'-fluoroadenosine-3'-phosphorothioate
  modified_base 3: mod_base = OTHER; note = 2'-O-methyluridine-3'-phosphate
  modified_base 4: mod_base = OTHER; note = 2'-O-methyluridine-3'-phosphate
  modified_base 5: mod_base = OTHER; note = 2'-O-methylcytidine-3'-phosphate
  modified_base 6: mod_base = OTHER; note = 2'-fluorouridine-3'-phosphate
  modified_base 7: mod_base = OTHER; note = 2'-O-methylcytidine-3'-phosphate
  modified_base 8: mod_base = OTHER; note = 2'-fluorouridine-3'-phosphate
  modified_base 9: mod_base = OTHER; note = 2'-fluoroadenosine-3'-phosphate
  modified_base 10: mod_base = OTHER; note = 2'-O-methyladenosine-3'-phosphate
  modified_base 11: mod_base = OTHER; note = 2'-O-methyladenosine-3'-phosphate
  modified_base 12: mod_base = OTHER; note = 2'-O-methyladenosine-3'-phosphate
  modified_base 13: mod_base = OTHER; note = 2'-O-methyluridine-3'-phosphate
  modified_base 14: mod_base = OTHER; note = 2'-fluoroadenosine-3'-phosphate
  modified_base 15: mod_base = OTHER; note = 2'-O-methyladenosine-3'-phosphate
  modified_base 16: mod_base = OTHER; note = 2'-fluoroadenosine-3'-phosphate
  modified_base 17: mod_base = OTHER; note = 2'-O-methylcytidine-3'-phosphate
  modified_base 18: mod_base = OTHER; note = 2'-O-methylcytidine-3'-phosphate
  modified_base 19: mod_base = OTHER; note = 2'-O-methylcytidine-3'-phosphate
  modified_base 20: mod_base = OTHER; note = 2'-O-methyladenosine-3'-phosphate
  modified_base 21: mod_base = OTHER; note = 2'-O-methylguanosine-3'-phosphorothioate
  modified_base 22: mod_base = OTHER; note = 2'-O-methylcytidine-3'-phosphorothioate
  modified_base 23: mod_base = OTHER; note = 2'-O-methyladenosine-3'-phosphate
aattctctaaaataaacccagca

SEQ ID NO: 3510 - RNA, 23 nt, synthetic construct
  source 1..23: mol_type = other RNA
  modified_base 1: mod_base = OTHER; note = 2'-O-methyladenosine-3'-phosphorothioate
  modified_base 2: mod_base = OTHER; note = 2'-fluorocytidine-3'-phosphorothioate
  modified_base 3: mod_base = OTHER; note = 2'-O-methyladenosine-3'-phosphate
  modified_base 4: mod_base = OTHER; note = 2'-O-methyluridine-3'-phosphate
  modified_base 5: mod_base = OTHER; note = 2'-O-methyluridine-3'-phosphate
  modified_base 6: mod_base = OTHER; note = 2'-fluorocytidine-3'-phosphate
  modified_base 7: mod_base = OTHER; note = 2'-O-methyluridine-3'-phosphate
  modified_base 8: mod_base = OTHER; note = 2'-fluorocytidine-3'-phosphate
  modified_base 9: mod_base = OTHER; note = 2'-fluorouridine-3'-phosphate
  modified_base 10: mod_base = OTHER; note = 2'-O-methyladenosine-3'-phosphate
  modified_base 11: mod_base = OTHER; note = 2'-O-methyladenosine-3'-phosphate
  modified_base 12: mod_base = OTHER; note = 2'-O-methyladenosine-3'-phosphate
  modified_base 13: mod_base = OTHER; note = 2'-O-methyladenosine-3'-phosphate
  modified_base 14: mod_base = OTHER; note = 2'-fluorouridine-3'-phosphate
  modified_base 15: mod_base = OTHER; note = 2'-O-methyladenosine-3'-phosphate
  modified_base 16: mod_base = OTHER; note = 2'-fluoroadenosine-3'-phosphate
  modified_base 17: mod_base = OTHER; note = 2'-O-methyladenosine-3'-phosphate
  modified_base 18: mod_base = OTHER; note = 2'-O-methylcytidine-3'-phosphate
  modified_base 19: mod_base = OTHER; note = 2'-O-methylcytidine-3'-phosphate
  modified_base 20: mod_base = OTHER; note = 2'-O-methylcytidine-3'-phosphate
  modified_base 21: mod_base = OTHER; note = 2'-O-methyladenosine-3'-phosphorothioate
  modified_base 22: mod_base = OTHER; note = 2'-O-methylguanosine-3'-phosphorothioate
  modified_base 23: mod_base = OTHER; note = 2'-O-methylcytidine-3'-phosphate
acattctctaaaataaacccagc

SEQ ID NO: 3511 - RNA, 23 nt, synthetic construct
  source 1..23: mol_type = other RNA
  modified_base 1: mod_base = OTHER; note = 2'-O-methyladenosine-3'-phosphorothioate
  modified_base 2: mod_base = OTHER; note = 2'-fluorouridine -3'-phosphorothioate
  modified_base 3: mod_base = OTHER; note = 2'-O-methyladenosine-3'-phosphate
  modified_base 4: mod_base = OTHER; note = 2'-O-methyladenosine-3'-phosphate
  modified_base 5: mod_base = OTHER; note = 2'-O-methyladenosine-3'-phosphate
  modified_base 6: mod_base = OTHER; note = 2'-fluorocytidine-3'-phosphate
  modified_base 7: mod_base = OTHER; note = 2'-O-methyladenosine-3'-phosphate
  modified_base 8: mod_base = OTHER; note = 2'-fluorocytidine-3'-phosphate
  modified_base 9: mod_base = OTHER; note = 2'-fluorouridine-3'-phosphate
  modified_base 10: mod_base = OTHER; note = 2'-O-methylguanosine-3'-phosphate
  modified_base 11: mod_base = OTHER; note = 2'-O-methylguanosine-3'-phosphate
  modified_base 12: mod_base = OTHER; note = 2'-O-methyluridine-3'-phosphate
  modified_base 13: mod_base = OTHER; note = 2'-O-methyluridine-3'-phosphate
  modified_base 14: mod_base = OTHER; note = 2'-fluorocytidine-3'-phosphate
  modified_base 15: mod_base = OTHER; note = 2'-O-methyluridine-3'-phosphate
  modified_base 16: mod_base = OTHER; note = 2'-fluorouridine-3'-phosphate
  modified_base 17: mod_base = OTHER; note = 2'-O-methylguanosine-3'-phosphate
  modified_base 18: mod_base = OTHER; note = 2'-O-methylcytidine-3'-phosphate
  modified_base 19: mod_base = OTHER; note = 2'-O-methylcytidine-3'-phosphate
  modified_base 20: mod_base = OTHER; note = 2'-O-methyluridine-3'-phosphate
  modified_base 21: mod_base = OTHER; note = 2'-O-methylcytidine-3'-phosphorothioate
  modified_base 22: mod_base = OTHER; note = 2'-O-methylcytidine-3'-phosphorothioate
  modified_base 23: mod_base = OTHER; note = 2'-O-methylcytidine-3'-phosphate
ataaacactggttcttgcctccc

SEQ ID NO: 3512 - RNA, 23 nt, synthetic construct
  source 1..23: mol_type = other RNA
  modified_base 1: mod_base = OTHER; note = 2'-O-methyladenosine-3'-phosphorothioate
  modified_base 2: mod_base = OTHER; note = 2'-fluorocytidine-3'-phosphorothioate
  modified_base 3: mod_base = OTHER; note = 2'-O-methylguanosine-3'-phosphate
  modified_base 4: mod_base = OTHER; note = 2'-O-methylcytidine-3'-phosphate
  modified_base 5: mod_base = OTHER; note = 2'-O-methyluridine-3'-phosphate
  modified_base 6: mod_base = OTHER; note = 2'-fluoroadenosine-3'-phosphate
  modified_base 7: mod_base = OTHER; note = 2'-O-methyladenosine-3'-phosphate
  modified_base 8: mod_base = OTHER; note = 2'-fluoroadenosine-3'-phosphate
  modified_base 9: mod_base = OTHER; note = 2'-fluorocytidine-3'-phosphate
  modified_base 10: mod_base = OTHER; note = 2'-O-methyladenosine-3'-phosphate
  modified_base 11: mod_base = OTHER; note = 2'-O-methylcytidine-3'-phosphate
  modified_base 12: mod_base = OTHER; note = 2'-O-methyluridine-3'-phosphate
  modified_base 13: mod_base = OTHER; note = 2'-O-methylguanosine-3'-phosphate
  modified_base 14: mod_base = OTHER; note = 2'-fluoroguanosine-3'-phosphate
  modified_base 15: mod_base = OTHER; note = 2'-O-methyluridine-3'-phosphate
  modified_base 16: mod_base = OTHER; note = 2'-fluorouridine-3'-phosphate
  modified_base 17: mod_base = OTHER; note = 2'-O-methylcytidine-3'-phosphate
  modified_base 18: mod_base = OTHER; note = 2'-O-methyluridine-3'-phosphate
  modified_base 19: mod_base = OTHER; note = 2'-O-methyluridine-3'-phosphate
  modified_base 20: mod_base = OTHER; note = 2'-O-methylguanosine-3'-phosphate
  modified_base 21: mod_base = OTHER; note = 2'-O-methylcytidine-3'-phosphorothioate
  modified_base 22: mod_base = OTHER; note = 2'-O-methylcytidine-3'-phosphorothioate
  modified_base 23: mod_base = OTHER; note = 2'-O-methyluridine-3'-phosphate
acgctaaacactggttcttgcct

SEQ ID NO: 3513 - RNA, 23 nt, synthetic construct
  source 1..23: mol_type = other RNA
  modified_base 1: mod_base = OTHER; note = 2'-O-methyladenosine-3'-phosphorothioate
  modified_base 2: mod_base = OTHER; note = 2'-fluoroguanosine-3'-phosphorothioate
  modified_base 3: mod_base = OTHER; note = 2'-O-methylcytidine-3'-phosphate
  modified_base 4: mod_base = OTHER; note = 2'-O-methylguanosine-3'-phosphate
  modified_base 5: mod_base = OTHER; note = 2'-O-methylcytidine-3'-phosphate
  modified_base 6: mod_base = OTHER; note = 2'-fluorouridine-3'-phosphate
  modified_base 7: mod_base = OTHER; note = 2'-O-methyladenosine-3'-phosphate
  modified_base 8: mod_base = OTHER; note = 2'-fluoroadenosine-3'-phosphate
  modified_base 9: mod_base = OTHER; note = 2'-fluoroadenosine-3'-phosphate
  modified_base 10: mod_base = OTHER; note = 2'-O-methylcytidine-3'-phosphate
  modified_base 11: mod_base = OTHER; note = 2'-O-methyladenosine-3'-phosphate
  modified_base 12: mod_base = OTHER; note = 2'-O-methylcytidine-3'-phosphate
  modified_base 13: mod_base = OTHER; note = 2'-O-methyluridine-3'-phosphate
  modified_base 14: mod_base = OTHER; note = 2'-fluoroguanosine-3'-phosphate
  modified_base 15: mod_base = OTHER; note = 2'-O-methylguanosine-3'-phosphate
  modified_base 16: mod_base = OTHER; note = 2'-fluorouridine-3'-phosphate
  modified_base 17: mod_base = OTHER; note = 2'-O-methyluridine-3'-phosphate
  modified_base 18: mod_base = OTHER; note = 2'-O-methylcytidine-3'-phosphate
  modified_base 19: mod_base = OTHER; note = 2'-O-methyluridine-3'-phosphate
  modified_base 20: mod_base = OTHER; note = 2'-O-methyluridine-3'-phosphate
  modified_base 21: mod_base = OTHER; note = 2'-O-methylguanosine-3'-phosphorothioate
  modified_base 22: mod_base = OTHER; note = 2'-O-methylcytidine-3'-phosphorothioate
  modified_base 23: mod_base = OTHER; note = 2'-O-methylcytidine-3'-phosphate
agcgctaaacactggttcttgcc

SEQ ID NO: 3514 - RNA, 23 nt, synthetic construct
  source 1..23: mol_type = other RNA
  modified_base 1: mod_base = OTHER; note = 2'-O-methyladenosine-3'-phosphorothioate
  modified_base 2: mod_base = OTHER; note = 2'-fluorocytidine-3'-phosphorothioate
  modified_base 3: mod_base = OTHER; note = 2'-O-methylguanosine-3'-phosphate
  modified_base 4: mod_base = OTHER; note = 2'-O-methylcytidine-3'-phosphate
  modified_base 5: mod_base = OTHER; note = 2'-O-methylguanosine-3'-phosphate
  modified_base 6: mod_base = OTHER; note = 2'-fluorocytidine-3'-phosphate
  modified_base 7: mod_base = OTHER; note = 2'-O-methyluridine-3'-phosphate
  modified_base 8: mod_base = OTHER; note = 2'-fluoroadenosine-3'-phosphate
  modified_base 9: mod_base = OTHER; note = 2'-fluoroadenosine-3'-phosphate
  modified_base 10: mod_base = OTHER; note = 2'-O-methyladenosine-3'-phosphate
  modified_base 11: mod_base = OTHER; note = 2'-O-methylcytidine-3'-phosphate
  modified_base 12: mod_base = OTHER; note = 2'-O-methyladenosine-3'-phosphate
  modified_base 13: mod_base = OTHER; note = 2'-O-methylcytidine-3'-phosphate
  modified_base 14: mod_base = OTHER; note = 2'-fluorouridine-3'-phosphate
  modified_base 15: mod_base = OTHER; note = 2'-O-methylguanosine-3'-phosphate
  modified_base 16: mod_base = OTHER; note = 2'-fluoroguanosine-3'-phosphate
  modified_base 17: mod_base = OTHER; note = 2'-O-methyluridine-3'-phosphate
  modified_base 18: mod_base = OTHER; note = 2'-O-methyluridine-3'-phosphate
  modified_base 19: mod_base = OTHER; note = 2'-O-methylcytidine-3'-phosphate
  modified_base 20: mod_base = OTHER; note = 2'-O-methyluridine-3'-phosphate
  modified_base 21: mod_base = OTHER; note = 2'-O-methyluridine-3'-phosphorothioate
  modified_base 22: mod_base = OTHER; note = 2'-O-methylguanosine-3'-phosphorothioate
  modified_base 23: mod_base = OTHER; note = 2'-O-methylcytidine-3'-phosphate
acgcgctaaacactggttcttgc

SEQ ID NO: 3515 - RNA, 23 nt, synthetic construct
  source 1..23: mol_type = other RNA
  modified_base 1: mod_base = OTHER; note = 2'-O-methyladenosine-3'-phosphorothioate
  modified_base 2: mod_base = OTHER; note = 2'-fluorocytidine-3'-phosphorothioate
  modified_base 3: mod_base = OTHER; note = 2'-O-methylcytidine-3'-phosphate
  modified_base 4: mod_base = OTHER; note = 2'-O-methylguanosine-3'-phosphate
  modified_base 5: mod_base = OTHER; note = 2'-O-methylcytidine-3'-phosphate
  modified_base 6: mod_base = OTHER; note = 2'-fluoroguanosine-3'-phosphate
  modified_base 7: mod_base = OTHER; note = 2'-O-methylcytidine-3'-phosphate
  modified_base 8: mod_base = OTHER; note = 2'-fluorouridine-3'-phosphate
  modified_base 9: mod_base = OTHER; note = 2'-fluoroadenosine-3'-phosphate
  modified_base 10: mod_base = OTHER; note = 2'-O-methyladenosine-3'-phosphate
  modified_base 11: mod_base = OTHER; note = 2'-O-methyladenosine-3'-phosphate
  modified_base 12: mod_base = OTHER; note = 2'-O-methylcytidine-3'-phosphate
  modified_base 13: mod_base = OTHER; note = 2'-O-methyladenosine-3'-phosphate
  modified_base 14: mod_base = OTHER; note = 2'-fluorocytidine-3'-phosphate
  modified_base 15: mod_base = OTHER; note = 2'-O-methyluridine-3'-phosphate
  modified_base 16: mod_base = OTHER; note = 2'-fluoroguanosine-3'-phosphate
  modified_base 17: mod_base = OTHER; note = 2'-O-methylguanosine-3'-phosphate
  modified_base 18: mod_base = OTHER; note = 2'-O-methyluridine-3'-phosphate
  modified_base 19: mod_base = OTHER; note = 2'-O-methyluridine-3'-phosphate
  modified_base 20: mod_base = OTHER; note = 2'-O-methylcytidine-3'-phosphate
  modified_base 21: mod_base = OTHER; note = 2'-O-methyluridine-3'-phosphorothioate
  modified_base 22: mod_base = OTHER; note = 2'-O-methyluridine-3'-phosphorothioate
  modified_base 23: mod_base = OTHER; note = 2'-O-methylguanosine-3'-phosphate
accgcgctaaacactggttcttg

SEQ ID NO: 3516 - RNA, 23 nt, synthetic construct
  source 1..23: mol_type = other RNA
  modified_base 1: mod_base = OTHER; note = 2'-O-methyladenosine-3'-phosphorothioate
  modified_base 2: mod_base = OTHER; note = 2'-fluorocytidine-3'-phosphorothioate
  modified_base 3: mod_base = OTHER; note = 2'-O-methylcytidine-3'-phosphate
  modified_base 4: mod_base = OTHER; note = 2'-O-methylcytidine-3'-phosphate
  modified_base 5: mod_base = OTHER; note = 2'-O-methylguanosine-3'-phosphate
  modified_base 6: mod_base = OTHER; note = 2'-fluorocytidine-3'-phosphate
  modified_base 7: mod_base = OTHER; note = 2'-O-methylguanosine-3'-phosphate
  modified_base 8: mod_base = OTHER; note = 2'-fluorocytidine-3'-phosphate
  modified_base 9: mod_base = OTHER; note = 2'-fluorouridine-3'-phosphate
  modified_base 10: mod_base = OTHER; note = 2'-O-methyladenosine-3'-phosphate
  modified_base 11: mod_base = OTHER; note = 2'-O-methyladenosine-3'-phosphate
  modified_base 12: mod_base = OTHER; note = 2'-O-methyladenosine-3'-phosphate
  modified_base 13: mod_base = OTHER; note = 2'-O-methylcytidine-3'-phosphate
  modified_base 14: mod_base = OTHER; note = 2'-fluoroadenosine-3'-phosphate
  modified_base 15: mod_base = OTHER; note = 2'-O-methylcytidine-3'-phosphate
  modified_base 16: mod_base = OTHER; note = 2'-fluorouridine-3'-phosphate
  modified_base 17: mod_base = OTHER; note = 2'-O-methylguanosine-3'-phosphate
  modified_base 18: mod_base = OTHER; note = 2'-O-methylguanosine-3'-phosphate
  modified_base 19: mod_base = OTHER; note = 2'-O-methyluridine-3'-phosphate
  modified_base 20: mod_base = OTHER; note = 2'-O-methyluridine-3'-phosphate
  modified_base 21: mod_base = OTHER; note = 2'-O-methylcytidine-3'-phosphorothioate
  modified_base 22: mod_base = OTHER; note = 2'-O-methyluridine-3'-phosphorothioate
  modified_base 23: mod_base = OTHER; note = 2'-O-methyluridine-3'-phosphate
acccgcgctaaacactggttctt

SEQ ID NO: 3517 - RNA, 23 nt, synthetic construct
  source 1..23: mol_type = other RNA
  modified_base 1: mod_base = OTHER; note = 2'-O-methyladenosine-3'-phosphorothioate
  modified_base 2: mod_base = OTHER; note = 2'-fluorouridine -3'-phosphorothioate
  modified_base 3: mod_base = OTHER; note = 2'-O-methylcytidine-3'-phosphate
  modified_base 4: mod_base = OTHER; note = 2'-O-methylcytidine-3'-phosphate
  modified_base 5: mod_base = OTHER; note = 2'-O-methylcytidine-3'-phosphate
  modified_base 6: mod_base = OTHER; note = 2'-fluoroguanosine-3'-phosphate
  modified_base 7: mod_base = OTHER; note = 2'-O-methylcytidine-3'-phosphate
  modified_base 8: mod_base = OTHER; note = 2'-fluoroguanosine-3'-phosphate
  modified_base 9: mod_base = OTHER; note = 2'-fluorocytidine-3'-phosphate
  modified_base 10: mod_base = OTHER; note = 2'-O-methyluridine-3'-phosphate
  modified_base 11: mod_base = OTHER; note = 2'-O-methyladenosine-3'-phosphate
  modified_base 12: mod_base = OTHER; note = 2'-O-methyladenosine-3'-phosphate
  modified_base 13: mod_base = OTHER; note = 2'-O-methyladenosine-3'-phosphate
  modified_base 14: mod_base = OTHER; note = 2'-fluorocytidine-3'-phosphate
  modified_base 15: mod_base = OTHER; note = 2'-O-methyladenosine-3'-phosphate
  modified_base 16: mod_base = OTHER; note = 2'-fluorocytidine-3'-phosphate
  modified_base 17: mod_base = OTHER; note = 2'-O-methyluridine-3'-phosphate
  modified_base 18: mod_base = OTHER; note = 2'-O-methylguanosine-3'-phosphate
  modified_base 19: mod_base = OTHER; note = 2'-O-methylguanosine-3'-phosphate
  modified_base 20: mod_base = OTHER; note = 2'-O-methyluridine-3'-phosphate
  modified_base 21: mod_base = OTHER; note = 2'-O-methyluridine-3'-phosphorothioate
  modified_base 22: mod_base = OTHER; note = 2'-O-methylcytidine-3'-phosphorothioate
  modified_base 23: mod_base = OTHER; note = 2'-O-methyluridine-3'-phosphate
atcccgcgctaaacactggttct

SEQ ID NO: 3518 - RNA, 23 nt, synthetic construct
  source 1..23: mol_type = other RNA
  modified_base 1: mod_base = OTHER; note = 2'-O-methyladenosine-3'-phosphorothioate
  modified_base 2: mod_base = OTHER; note = 2'-fluoroguanosine-3'-phosphorothioate
  modified_base 3: mod_base = OTHER; note = 2'-O-methyluridine-3'-phosphate
  modified_base 4: mod_base = OTHER; note = 2'-O-methyluridine-3'-phosphate
  modified_base 5: mod_base = OTHER; note = 2'-O-methylguanosine-3'-phosphate
  modified_base 6: mod_base = OTHER; note = 2'-fluoroguanosine-3'-phosphate
  modified_base 7: mod_base = OTHER; note = 2'-O-methyladenosine-3'-phosphate
  modified_base 8: mod_base = OTHER; note = 2'-fluoroadenosine-3'-phosphate
  modified_base 9: mod_base = OTHER; note = 2'-fluorouridine-3'-phosphate
  modified_base 10: mod_base = OTHER; note = 2'-O-methyluridine-3'-phosphate
  modified_base 11: mod_base = OTHER; note = 2'-O-methylcytidine-3'-phosphate
  modified_base 12: mod_base = OTHER; note = 2'-O-methyluridine-3'-phosphate
  modified_base 13: mod_base = OTHER; note = 2'-O-methyluridine-3'-phosphate
  modified_base 14: mod_base = OTHER; note = 2'-fluorouridine-3'-phosphate
  modified_base 15: mod_base = OTHER; note = 2'-O-methyluridine-3'-phosphate
  modified_base 16: mod_base = OTHER; note = 2'-fluorouridine-3'-phosphate
  modified_base 17: mod_base = OTHER; note = 2'-O-methylguanosine-3'-phosphate
  modified_base 18: mod_base = OTHER; note = 2'-O-methylguanosine-3'-phosphate
  modified_base 19: mod_base = OTHER; note = 2'-O-methyladenosine-3'-phosphate
  modified_base 20: mod_base = OTHER; note = 2'-O-methyladenosine-3'-phosphate
  modified_base 21: mod_base = OTHER; note = 2'-O-methylcytidine-3'-phosphorothioate
  modified_base 22: mod_base = OTHER; note = 2'-O-methyladenosine-3'-phosphorothioate
  modified_base 23: mod_base = OTHER; note = 2'-O-methylguanosine-3'-phosphate
agttggaattctttttggaacag

SEQ ID NO: 3519 - RNA, 23 nt, synthetic construct
  source 1..23: mol_type = other RNA
  modified_base 1: mod_base = OTHER; note = 2'-O-methyladenosine-3'-phosphorothioate
  modified_base 2: mod_base = OTHER; note = 2'-fluorocytidine-3'-phosphorothioate
  modified_base 3: mod_base = OTHER; note = 2'-O-methylguanosine-3'-phosphate
  modified_base 4: mod_base = OTHER; note = 2'-O-methylguanosine-3'-phosphate
  modified_base 5: mod_base = OTHER; note = 2'-O-methyluridine-3'-phosphate
  modified_base 6: mod_base = OTHER; note = 2'-fluorouridine-3'-phosphate
  modified_base 7: mod_base = OTHER; note = 2'-O-methylguanosine-3'-phosphate
  modified_base 8: mod_base = OTHER; note = 2'-fluoroguanosine-3'-phosphate
  modified_base 9: mod_base = OTHER; note = 2'-fluoroadenosine-3'-phosphate
  modified_base 10: mod_base = OTHER; note = 2'-O-methyladenosine-3'-phosphate
  modified_base 11: mod_base = OTHER; note = 2'-O-methyluridine-3'-phosphate
  modified_base 12: mod_base = OTHER; note = 2'-O-methyluridine-3'-phosphate
  modified_base 13: mod_base = OTHER; note = 2'-O-methylcytidine-3'-phosphate
  modified_base 14: mod_base = OTHER; note = 2'-fluorouridine-3'-phosphate
  modified_base 15: mod_base = OTHER; note = 2'-O-methyluridine-3'-phosphate
  modified_base 16: mod_base = OTHER; note = 2'-fluorouridine-3'-phosphate
  modified_base 17: mod_base = OTHER; note = 2'-O-methyluridine-3'-phosphate
  modified_base 18: mod_base = OTHER; note = 2'-O-methyluridine-3'-phosphate
  modified_base 19: mod_base = OTHER; note = 2'-O-methylguanosine-3'-phosphate
  modified_base 20: mod_base = OTHER; note = 2'-O-methylguanosine-3'-phosphate
  modified_base 21: mod_base = OTHER; note = 2'-O-methyladenosine-3'-phosphorothioate
  modified_base 22: mod_base = OTHER; note = 2'-O-methyladenosine-3'-phosphorothioate
  modified_base 23: mod_base = OTHER; note = 2'-O-methylcytidine-3'-phosphate
acggttggaattctttttggaac

SEQ ID NO: 3520 - RNA, 23 nt, synthetic construct
  source 1..23: mol_type = other RNA
  modified_base 1: mod_base = OTHER; note = 2'-O-methyladenosine-3'-phosphorothioate
  modified_base 2: mod_base = OTHER; note = 2'-fluorouridine -3'-phosphorothioate
  modified_base 3: mod_base = OTHER; note = 2'-O-methylcytidine-3'-phosphate
  modified_base 4: mod_base = OTHER; note = 2'-O-methylguanosine-3'-phosphate
  modified_base 5: mod_base = OTHER; note = 2'-O-methylguanosine-3'-phosphate
  modified_base 6: mod_base = OTHER; note = 2'-fluorouridine-3'-phosphate
  modified_base 7: mod_base = OTHER; note = 2'-O-methyluridine-3'-phosphate
  modified_base 8: mod_base = OTHER; note = 2'-fluoroguanosine-3'-phosphate
  modified_base 9: mod_base = OTHER; note = 2'-fluoroguanosine-3'-phosphate
  modified_base 10: mod_base = OTHER; note = 2'-O-methyladenosine-3'-phosphate
  modified_base 11: mod_base = OTHER; note = 2'-O-methyladenosine-3'-phosphate
  modified_base 12: mod_base = OTHER; note = 2'-O-methyluridine-3'-phosphate
  modified_base 13: mod_base = OTHER; note = 2'-O-methyluridine-3'-phosphate
  modified_base 14: mod_base = OTHER; note = 2'-fluorocytidine-3'-phosphate
  modified_base 15: mod_base = OTHER; note = 2'-O-methyluridine-3'-phosphate
  modified_base 16: mod_base = OTHER; note = 2'-fluorouridine-3'-phosphate
  modified_base 17: mod_base = OTHER; note = 2'-O-methyluridine-3'-phosphate
  modified_base 18: mod_base = OTHER; note = 2'-O-methyluridine-3'-phosphate
  modified_base 19: mod_base = OTHER; note = 2'-O-methyluridine-3'-phosphate
  modified_base 20: mod_base = OTHER; note = 2'-O-methylguanosine-3'-phosphate
  modified_base 21: mod_base = OTHER; note = 2'-O-methylguanosine-3'-phosphorothioate
  modified_base 22: mod_base = OTHER; note = 2'-O-methyladenosine-3'-phosphorothioate
  modified_base 23: mod_base = OTHER; note = 2'-O-methyladenosine-3'-phosphate
atcggttggaattctttttggaa

SEQ ID NO: 3521 - RNA, 23 nt, synthetic construct
  source 1..23: mol_type = other RNA
  modified_base 1: mod_base = OTHER; note = 2'-O-methyladenosine-3'-phosphorothioate
  modified_base 2: mod_base = OTHER; note = 2'-fluoroguanosine-3'-phosphorothioate
  modified_base 3: mod_base = OTHER; note = 2'-O-methylguanosine-3'-phosphate
  modified_base 4: mod_base = OTHER; note = 2'-O-methyluridine-3'-phosphate
  modified_base 5: mod_base = OTHER; note = 2'-O-methylcytidine-3'-phosphate
  modified_base 6: mod_base = OTHER; note = 2'-fluoroguanosine-3'-phosphate
  modified_base 7: mod_base = OTHER; note = 2'-O-methylguanosine-3'-phosphate
  modified_base 8: mod_base = OTHER; note = 2'-fluorouridine-3'-phosphate
  modified_base 9: mod_base = OTHER; note = 2'-fluorouridine-3'-phosphate
  modified_base 10: mod_base = OTHER; note = 2'-O-methylguanosine-3'-phosphate
  modified_base 11: mod_base = OTHER; note = 2'-O-methylguanosine-3'-phosphate
  modified_base 12: mod_base = OTHER; note = 2'-O-methyladenosine-3'-phosphate
  modified_base 13: mod_base = OTHER; note = 2'-O-methyladenosine-3'-phosphate
  modified_base 14: mod_base = OTHER; note = 2'-fluorouridine-3'-phosphate
  modified_base 15: mod_base = OTHER; note = 2'-O-methyluridine-3'-phosphate
  modified_base 16: mod_base = OTHER; note = 2'-fluorocytidine-3'-phosphate
  modified_base 17: mod_base = OTHER; note = 2'-O-methyluridine-3'-phosphate
  modified_base 18: mod_base = OTHER; note = 2'-O-methyluridine-3'-phosphate
  modified_base 19: mod_base = OTHER; note = 2'-O-methyluridine-3'-phosphate
  modified_base 20: mod_base = OTHER; note = 2'-O-methyluridine-3'-phosphate
  modified_base 21: mod_base = OTHER; note = 2'-O-methyluridine-3'-phosphorothioate
  modified_base 22: mod_base = OTHER; note = 2'-O-methylguanosine-3'-phosphorothioate
  modified_base 23: mod_base = OTHER; note = 2'-O-methylguanosine-3'-phosphate
aggtcggttggaattctttttgg

SEQ ID NO: 3522 - RNA, 23 nt, synthetic construct
  source 1..23: mol_type = other RNA
  modified_base 1: mod_base = OTHER; note = 2'-O-methyladenosine-3'-phosphorothioate
  modified_base 2: mod_base = OTHER; note = 2'-fluorouridine -3'-phosphorothioate
  modified_base 3: mod_base = OTHER; note = 2'-O-methylguanosine-3'-phosphate
  modified_base 4: mod_base = OTHER; note = 2'-O-methylguanosine-3'-phosphate
  modified_base 5: mod_base = OTHER; note = 2'-O-methyluridine-3'-phosphate
  modified_base 6: mod_base = OTHER; note = 2'-fluorocytidine-3'-phosphate
  modified_base 7: mod_base = OTHER; note = 2'-O-methylguanosine-3'-phosphate
  modified_base 8: mod_base = OTHER; note = 2'-fluoroguanosine-3'-phosphate
  modified_base 9: mod_base = OTHER; note = 2'-fluorouridine-3'-phosphate
  modified_base 10: mod_base = OTHER; note = 2'-O-methyluridine-3'-phosphate
  modified_base 11: mod_base = OTHER; note = 2'-O-methylguanosine-3'-phosphate
  modified_base 12: mod_base = OTHER; note = 2'-O-methylguanosine-3'-phosphate
  modified_base 13: mod_base = OTHER; note = 2'-O-methyladenosine-3'-phosphate
  modified_base 14: mod_base = OTHER; note = 2'-fluoroadenosine-3'-phosphate
  modified_base 15: mod_base = OTHER; note = 2'-O-methyluridine-3'-phosphate
  modified_base 16: mod_base = OTHER; note = 2'-fluorouridine-3'-phosphate
  modified_base 17: mod_base = OTHER; note = 2'-O-methylcytidine-3'-phosphate
  modified_base 18: mod_base = OTHER; note = 2'-O-methyluridine-3'-phosphate
  modified_base 19: mod_base = OTHER; note = 2'-O-methyluridine-3'-phosphate
  modified_base 20: mod_base = OTHER; note = 2'-O-methyluridine-3'-phosphate
  modified_base 21: mod_base = OTHER; note = 2'-O-methyluridine-3'-phosphorothioate
  modified_base 22: mod_base = OTHER; note = 2'-O-methyluridine-3'-phosphorothioate
  modified_base 23: mod_base = OTHER; note = 2'-O-methylguanosine-3'-phosphate
atggtcggttggaattctttttg

SEQ ID NO: 3523 - RNA, 23 nt, synthetic construct
  source 1..23: mol_type = other RNA
  modified_base 1: mod_base = OTHER; note = 2'-O-methyladenosine-3'-phosphorothioate
  modified_base 2: mod_base = OTHER; note = 2'-fluorocytidine-3'-phosphorothioate
  modified_base 3: mod_base = OTHER; note = 2'-O-methyluridine-3'-phosphate
  modified_base 4: mod_base = OTHER; note = 2'-O-methylguanosine-3'-phosphate
  modified_base 5: mod_base = OTHER; note = 2'-O-methylguanosine-3'-phosphate
  modified_base 6: mod_base = OTHER; note = 2'-fluorouridine-3'-phosphate
  modified_base 7: mod_base = OTHER; note = 2'-O-methylcytidine-3'-phosphate
  modified_base 8: mod_base = OTHER; note = 2'-fluoroguanosine-3'-phosphate
  modified_base 9: mod_base = OTHER; note = 2'-fluoroguanosine-3'-phosphate
  modified_base 10: mod_base = OTHER; note = 2'-O-methyluridine-3'-phosphate
  modified_base 11: mod_base = OTHER; note = 2'-O-methyluridine-3'-phosphate
  modified_base 12: mod_base = OTHER; note = 2'-O-methylguanosine-3'-phosphate
  modified_base 13: mod_base = OTHER; note = 2'-O-methylguanosine-3'-phosphate
  modified_base 14: mod_base = OTHER; note = 2'-fluoroadenosine-3'-phosphate
  modified_base 15: mod_base = OTHER; note = 2'-O-methyladenosine-3'-phosphate
  modified_base 16: mod_base = OTHER; note = 2'-fluorouridine-3'-phosphate
  modified_base 17: mod_base = OTHER; note = 2'-O-methyluridine-3'-phosphate
  modified_base 18: mod_base = OTHER; note = 2'-O-methylcytidine-3'-phosphate
  modified_base 19: mod_base = OTHER; note = 2'-O-methyluridine-3'-phosphate
  modified_base 20: mod_base = OTHER; note = 2'-O-methyluridine-3'-phosphate
  modified_base 21: mod_base = OTHER; note = 2'-O-methyluridine-3'-phosphorothioate
  modified_base 22: mod_base = OTHER; note = 2'-O-methyluridine-3'-phosphorothioate
  modified_base 23: mod_base = OTHER; note = 2'-O-methyluridine-3'-phosphate
actggtcggttggaattcttttt

SEQ ID NO: 3524 - RNA, 23 nt, synthetic construct
  source 1..23: mol_type = other RNA
  modified_base 1: mod_base = OTHER; note = 2'-O-methyladenosine-3'-phosphorothioate
  modified_base 2: mod_base = OTHER; note = 2'-fluoroguanosine-3'-phosphorothioate
  modified_base 3: mod_base = OTHER; note = 2'-O-methylcytidine-3'-phosphate
  modified_base 4: mod_base = OTHER; note = 2'-O-methyluridine-3'-phosphate
  modified_base 5: mod_base = OTHER; note = 2'-O-methylguanosine-3'-phosphate
  modified_base 6: mod_base = OTHER; note = 2'-fluoroguanosine-3'-phosphate
  modified_base 7: mod_base = OTHER; note = 2'-O-methyluridine-3'-phosphate
  modified_base 8: mod_base = OTHER; note = 2'-fluorocytidine-3'-phosphate
  modified_base 9: mod_base = OTHER; note = 2'-fluoroguanosine-3'-phosphate
  modified_base 10: mod_base = OTHER; note = 2'-O-methylguanosine-3'-phosphate
  modified_base 11: mod_base = OTHER; note = 2'-O-methyluridine-3'-phosphate
  modified_base 12: mod_base = OTHER; note = 2'-O-methyluridine-3'-phosphate
  modified_base 13: mod_base = OTHER; note = 2'-O-methylguanosine-3'-phosphate
  modified_base 14: mod_base = OTHER; note = 2'-fluoroguanosine-3'-phosphate
  modified_base 15: mod_base = OTHER; note = 2'-O-methyladenosine-3'-phosphate
  modified_base 16: mod_base = OTHER; note = 2'-fluoroadenosine-3'-phosphate
  modified_base 17: mod_base = OTHER; note = 2'-O-methyluridine-3'-phosphate
  modified_base 18: mod_base = OTHER; note = 2'-O-methyluridine-3'-phosphate
  modified_base 19: mod_base = OTHER; note = 2'-O-methylcytidine-3'-phosphate
  modified_base 20: mod_base = OTHER; note = 2'-O-methyluridine-3'-phosphate
  modified_base 21: mod_base = OTHER; note = 2'-O-methyluridine-3'-phosphorothioate
  modified_base 22: mod_base = OTHER; note = 2'-O-methyluridine-3'-phosphorothioate
  modified_base 23: mod_base = OTHER; note = 2'-O-methyluridine-3'-phosphate
agctggtcggttggaattctttt

SEQ ID NO: 3525 - RNA, 23 nt, synthetic construct
  source 1..23: mol_type = other RNA
  modified_base 1: mod_base = OTHER; note = 2'-O-methyladenosine-3'-phosphorothioate
  modified_base 2: mod_base = OTHER; note = 2'-fluoroadenosine-3'-phosphorothioate
  modified_base 3: mod_base = OTHER; note = 2'-O-methyladenosine-3'-phosphate
  modified_base 4: mod_base = OTHER; note = 2'-O-methylguanosine-3'-phosphate
  modified_base 5: mod_base = OTHER; note = 2'-O-methylcytidine-3'-phosphate
  modified_base 6: mod_base = OTHER; note = 2'-fluorouridine-3'-phosphate
  modified_base 7: mod_base = OTHER; note = 2'-O-methylguanosine-3'-phosphate
  modified_base 8: mod_base = OTHER; note = 2'-fluoroguanosine-3'-phosphate
  modified_base 9: mod_base = OTHER; note = 2'-fluorouridine-3'-phosphate
  modified_base 10: mod_base = OTHER; note = 2'-O-methylcytidine-3'-phosphate
  modified_base 11: mod_base = OTHER; note = 2'-O-methylguanosine-3'-phosphate
  modified_base 12: mod_base = OTHER; note = 2'-O-methylguanosine-3'-phosphate
  modified_base 13: mod_base = OTHER; note = 2'-O-methyluridine-3'-phosphate
  modified_base 14: mod_base = OTHER; note = 2'-fluorouridine-3'-phosphate
  modified_base 15: mod_base = OTHER; note = 2'-O-methylguanosine-3'-phosphate
  modified_base 16: mod_base = OTHER; note = 2'-fluoroguanosine-3'-phosphate
  modified_base 17: mod_base = OTHER; note = 2'-O-methyladenosine-3'-phosphate
  modified_base 18: mod_base = OTHER; note = 2'-O-methyladenosine-3'-phosphate
  modified_base 19: mod_base = OTHER; note = 2'-O-methyluridine-3'-phosphate
  modified_base 20: mod_base = OTHER; note = 2'-O-methyluridine-3'-phosphate
  modified_base 21: mod_base = OTHER; note = 2'-O-methylcytidine-3'-phosphorothioate
  modified_base 22: mod_base = OTHER; note = 2'-O-methyluridine-3'-phosphorothioate
  modified_base 23: mod_base = OTHER; note = 2'-O-methyluridine-3'-phosphate
aaagctggtcggttggaattctt

SEQ ID NO: 3526 - RNA, 23 nt, synthetic construct
  source 1..23: mol_type = other RNA
  modified_base 1: mod_base = OTHER; note = 2'-O-methyladenosine-3'-phosphorothioate
  modified_base 2: mod_base = OTHER; note = 2'-fluorocytidine-3'-phosphorothioate
  modified_base 3: mod_base = OTHER; note = 2'-O-methyladenosine-3'-phosphate
  modified_base 4: mod_base = OTHER; note = 2'-O-methyladenosine-3'-phosphate
  modified_base 5: mod_base = OTHER; note = 2'-O-methylguanosine-3'-phosphate
  modified_base 6: mod_base = OTHER; note = 2'-fluorocytidine-3'-phosphate
  modified_base 7: mod_base = OTHER; note = 2'-O-methyluridine-3'-phosphate
  modified_base 8: mod_base = OTHER; note = 2'-fluoroguanosine-3'-phosphate
  modified_base 9: mod_base = OTHER; note = 2'-fluoroguanosine-3'-phosphate
  modified_base 10: mod_base = OTHER; note = 2'-O-methyluridine-3'-phosphate
  modified_base 11: mod_base = OTHER; note = 2'-O-methylcytidine-3'-phosphate
  modified_base 12: mod_base = OTHER; note = 2'-O-methylguanosine-3'-phosphate
  modified_base 13: mod_base = OTHER; note = 2'-O-methylguanosine-3'-phosphate
  modified_base 14: mod_base = OTHER; note = 2'-fluorouridine-3'-phosphate
  modified_base 15: mod_base = OTHER; note = 2'-O-methyluridine-3'-phosphate
  modified_base 16: mod_base = OTHER; note = 2'-fluoroguanosine-3'-phosphate
  modified_base 17: mod_base = OTHER; note = 2'-O-methylguanosine-3'-phosphate
  modified_base 18: mod_base = OTHER; note = 2'-O-methyladenosine-3'-phosphate
  modified_base 19: mod_base = OTHER; note = 2'-O-methyladenosine-3'-phosphate
  modified_base 20: mod_base = OTHER; note = 2'-O-methyluridine-3'-phosphate
  modified_base 21: mod_base = OTHER; note = 2'-O-methyluridine-3'-phosphorothioate
  modified_base 22: mod_base = OTHER; note = 2'-O-methylcytidine-3'-phosphorothioate
  modified_base 23: mod_base = OTHER; note = 2'-O-methyluridine-3'-phosphate
acaagctggtcggttggaattct

SEQ ID NO: 3527 - RNA, 23 nt, synthetic construct
  source 1..23: mol_type = other RNA
  modified_base 1: mod_base = OTHER; note = 2'-O-methyladenosine-3'-phosphorothioate
  modified_base 2: mod_base = OTHER; note = 2'-fluoroadenosine-3'-phosphorothioate
  modified_base 3: mod_base = OTHER; note = 2'-O-methylcytidine-3'-phosphate
  modified_base 4: mod_base = OTHER; note = 2'-O-methyladenosine-3'-phosphate
  modified_base 5: mod_base = OTHER; note = 2'-O-methyladenosine-3'-phosphate
  modified_base 6: mod_base = OTHER; note = 2'-fluoroguanosine-3'-phosphate
  modified_base 7: mod_base = OTHER; note = 2'-O-methylcytidine-3'-phosphate
  modified_base 8: mod_base = OTHER; note = 2'-fluorouridine-3'-phosphate
  modified_base 9: mod_base = OTHER; note = 2'-fluoroguanosine-3'-phosphate
  modified_base 10: mod_base = OTHER; note = 2'-O-methylguanosine-3'-phosphate
  modified_base 11: mod_base = OTHER; note = 2'-O-methyluridine-3'-phosphate
  modified_base 12: mod_base = OTHER; note = 2'-O-methylcytidine-3'-phosphate
  modified_base 13: mod_base = OTHER; note = 2'-O-methylguanosine-3'-phosphate
  modified_base 14: mod_base = OTHER; note = 2'-fluoroguanosine-3'-phosphate
  modified_base 15: mod_base = OTHER; note = 2'-O-methyluridine-3'-phosphate
  modified_base 16: mod_base = OTHER; note = 2'-fluorouridine-3'-phosphate
  modified_base 17: mod_base = OTHER; note = 2'-O-methylguanosine-3'-phosphate
  modified_base 18: mod_base = OTHER; note = 2'-O-methylguanosine-3'-phosphate
  modified_base 19: mod_base = OTHER; note = 2'-O-methyladenosine-3'-phosphate
  modified_base 20: mod_base = OTHER; note = 2'-O-methyladenosine-3'-phosphate
  modified_base 21: mod_base = OTHER; note = 2'-O-methyluridine-3'-phosphorothioate
  modified_base 22: mod_base = OTHER; note = 2'-O-methyluridine-3'-phosphorothioate
  modified_base 23: mod_base = OTHER; note = 2'-O-methylcytidine-3'-phosphate
aacaagctggtcggttggaattc

SEQ ID NO: 3528 - RNA, 23 nt, synthetic construct
  source 1..23: mol_type = other RNA
  modified_base 1: mod_base = OTHER; note = 2'-O-methyladenosine-3'-phosphorothioate
  modified_base 2: mod_base = OTHER; note = 2'-fluoroadenosine-3'-phosphorothioate
  modified_base 3: mod_base = OTHER; note = 2'-O-methyladenosine-3'-phosphate
  modified_base 4: mod_base = OTHER; note = 2'-O-methyladenosine-3'-phosphate
  modified_base 5: mod_base = OTHER; note = 2'-O-methylcytidine-3'-phosphate
  modified_base 6: mod_base = OTHER; note = 2'-fluoroadenosine-3'-phosphate
  modified_base 7: mod_base = OTHER; note = 2'-O-methyladenosine-3'-phosphate
  modified_base 8: mod_base = OTHER; note = 2'-fluoroguanosine-3'-phosphate
  modified_base 9: mod_base = OTHER; note = 2'-fluorocytidine-3'-phosphate
  modified_base 10: mod_base = OTHER; note = 2'-O-methyluridine-3'-phosphate
  modified_base 11: mod_base = OTHER; note = 2'-O-methylguanosine-3'-phosphate
  modified_base 12: mod_base = OTHER; note = 2'-O-methylguanosine-3'-phosphate
  modified_base 13: mod_base = OTHER; note = 2'-O-methyluridine-3'-phosphate
  modified_base 14: mod_base = OTHER; note = 2'-fluorocytidine-3'-phosphate
  modified_base 15: mod_base = OTHER; note = 2'-O-methylguanosine-3'-phosphate
  modified_base 16: mod_base = OTHER; note = 2'-fluoroguanosine-3'-phosphate
  modified_base 17: mod_base = OTHER; note = 2'-O-methyluridine-3'-phosphate
  modified_base 18: mod_base = OTHER; note = 2'-O-methyluridine-3'-phosphate
  modified_base 19: mod_base = OTHER; note = 2'-O-methylguanosine-3'-phosphate
  modified_base 20: mod_base = OTHER; note = 2'-O-methylguanosine-3'-phosphate
  modified_base 21: mod_base = OTHER; note = 2'-O-methyladenosine-3'-phosphorothioate
  modified_base 22: mod_base = OTHER; note = 2'-O-methyladenosine-3'-phosphorothioate
  modified_base 23: mod_base = OTHER; note = 2'-O-methyluridine-3'-phosphate
aaaacaagctggtcggttggaat

SEQ ID NO: 3529 - RNA, 23 nt, synthetic construct
  source 1..23: mol_type = other RNA
  modified_base 1: mod_base = OTHER; note = 2'-O-methyladenosine-3'-phosphorothioate
  modified_base 2: mod_base = OTHER; note = 2'-fluorocytidine-3'-phosphorothioate
  modified_base 3: mod_base = OTHER; note = 2'-O-methyladenosine-3'-phosphate
  modified_base 4: mod_base = OTHER; note = 2'-O-methyladenosine-3'-phosphate
  modified_base 5: mod_base = OTHER; note = 2'-O-methyladenosine-3'-phosphate
  modified_base 6: mod_base = OTHER; note = 2'-fluorocytidine-3'-phosphate
  modified_base 7: mod_base = OTHER; note = 2'-O-methyladenosine-3'-phosphate
  modified_base 8: mod_base = OTHER; note = 2'-fluoroadenosine-3'-phosphate
  modified_base 9: mod_base = OTHER; note = 2'-fluoroguanosine-3'-phosphate
  modified_base 10: mod_base = OTHER; note = 2'-O-methylcytidine-3'-phosphate
  modified_base 11: mod_base = OTHER; note = 2'-O-methyluridine-3'-phosphate
  modified_base 12: mod_base = OTHER; note = 2'-O-methylguanosine-3'-phosphate
  modified_base 13: mod_base = OTHER; note = 2'-O-methylguanosine-3'-phosphate
  modified_base 14: mod_base = OTHER; note = 2'-fluorouridine-3'-phosphate
  modified_base 15: mod_base = OTHER; note = 2'-O-methylcytidine-3'-phosphate
  modified_base 16: mod_base = OTHER; note = 2'-fluoroguanosine-3'-phosphate
  modified_base 17: mod_base = OTHER; note = 2'-O-methylguanosine-3'-phosphate
  modified_base 18: mod_base = OTHER; note = 2'-O-methyluridine-3'-phosphate
  modified_base 19: mod_base = OTHER; note = 2'-O-methyluridine-3'-phosphate
  modified_base 20: mod_base = OTHER; note = 2'-O-methylguanosine-3'-phosphate
  modified_base 21: mod_base = OTHER; note = 2'-O-methylguanosine-3'-phosphorothioate
  modified_base 22: mod_base = OTHER; note = 2'-O-methyladenosine-3'-phosphorothioate
  modified_base 23: mod_base = OTHER; note = 2'-O-methyladenosine-3'-phosphate
acaaacaagctggtcggttggaa

SEQ ID NO: 3530 - RNA, 23 nt, synthetic construct
  source 1..23: mol_type = other RNA
  modified_base 1: mod_base = OTHER; note = 2'-O-methyladenosine-3'-phosphorothioate
  modified_base 2: mod_base = OTHER; note = 2'-fluoroadenosine-3'-phosphorothioate
  modified_base 3: mod_base = OTHER; note = 2'-O-methylcytidine-3'-phosphate
  modified_base 4: mod_base = OTHER; note = 2'-O-methyladenosine-3'-phosphate
  modified_base 5: mod_base = OTHER; note = 2'-O-methyladenosine-3'-phosphate
  modified_base 6: mod_base = OTHER; note = 2'-fluoroadenosine-3'-phosphate
  modified_base 7: mod_base = OTHER; note = 2'-O-methylcytidine-3'-phosphate
  modified_base 8: mod_base = OTHER; note = 2'-fluoroadenosine-3'-phosphate
  modified_base 9: mod_base = OTHER; note = 2'-fluoroadenosine-3'-phosphate
  modified_base 10: mod_base = OTHER; note = 2'-O-methylguanosine-3'-phosphate
  modified_base 11: mod_base = OTHER; note = 2'-O-methylcytidine-3'-phosphate
  modified_base 12: mod_base = OTHER; note = 2'-O-methyluridine-3'-phosphate
  modified_base 13: mod_base = OTHER; note = 2'-O-methylguanosine-3'-phosphate
  modified_base 14: mod_base = OTHER; note = 2'-fluoroguanosine-3'-phosphate
  modified_base 15: mod_base = OTHER; note = 2'-O-methyluridine-3'-phosphate
  modified_base 16: mod_base = OTHER; note = 2'-fluorocytidine-3'-phosphate
  modified_base 17: mod_base = OTHER; note = 2'-O-methylguanosine-3'-phosphate
  modified_base 18: mod_base = OTHER; note = 2'-O-methylguanosine-3'-phosphate
  modified_base 19: mod_base = OTHER; note = 2'-O-methyluridine-3'-phosphate
  modified_base 20: mod_base = OTHER; note = 2'-O-methyluridine-3'-phosphate
  modified_base 21: mod_base = OTHER; note = 2'-O-methylguanosine-3'-phosphorothioate
  modified_base 22: mod_base = OTHER; note = 2'-O-methylguanosine-3'-phosphorothioate
  modified_base 23: mod_base = OTHER; note = 2'-O-methyladenosine-3'-phosphate
aacaaacaagctggtcggttgga

SEQ ID NO: 3531 - RNA, 23 nt, synthetic construct
  source 1..23: mol_type = other RNA
  modified_base 1: mod_base = OTHER; note = 2'-O-methyladenosine-3'-phosphorothioate
  modified_base 2: mod_base = OTHER; note = 2'-fluorocytidine-3'-phosphorothioate
  modified_base 3: mod_base = OTHER; note = 2'-O-methyladenosine-3'-phosphate
  modified_base 4: mod_base = OTHER; note = 2'-O-methylcytidine-3'-phosphate
  modified_base 5: mod_base = OTHER; note = 2'-O-methyladenosine-3'-phosphate
  modified_base 6: mod_base = OTHER; note = 2'-fluoroadenosine-3'-phosphate
  modified_base 7: mod_base = OTHER; note = 2'-O-methyladenosine-3'-phosphate
  modified_base 8: mod_base = OTHER; note = 2'-fluorocytidine-3'-phosphate
  modified_base 9: mod_base = OTHER; note = 2'-fluoroadenosine-3'-phosphate
  modified_base 10: mod_base = OTHER; note = 2'-O-methyladenosine-3'-phosphate
  modified_base 11: mod_base = OTHER; note = 2'-O-methylguanosine-3'-phosphate
  modified_base 12: mod_base = OTHER; note = 2'-O-methylcytidine-3'-phosphate
  modified_base 13: mod_base = OTHER; note = 2'-O-methyluridine-3'-phosphate
  modified_base 14: mod_base = OTHER; note = 2'-fluoroguanosine-3'-phosphate
  modified_base 15: mod_base = OTHER; note = 2'-O-methylguanosine-3'-phosphate
  modified_base 16: mod_base = OTHER; note = 2'-fluorouridine-3'-phosphate
  modified_base 17: mod_base = OTHER; note = 2'-O-methylcytidine-3'-phosphate
  modified_base 18: mod_base = OTHER; note = 2'-O-methylguanosine-3'-phosphate
  modified_base 19: mod_base = OTHER; note = 2'-O-methylguanosine-3'-phosphate
  modified_base 20: mod_base = OTHER; note = 2'-O-methyluridine-3'-phosphate
  modified_base 21: mod_base = OTHER; note = 2'-O-methyluridine-3'-phosphorothioate
  modified_base 22: mod_base = OTHER; note = 2'-O-methylguanosine-3'-phosphorothioate
  modified_base 23: mod_base = OTHER; note = 2'-O-methylguanosine-3'-phosphate
acacaaacaagctggtcggttgg

SEQ ID NO: 3532 - RNA, 23 nt, synthetic construct
  source 1..23: mol_type = other RNA
  modified_base 1: mod_base = OTHER; note = 2'-O-methyladenosine-3'-phosphorothioate
  modified_base 2: mod_base = OTHER; note = 2'-fluorouridine -3'-phosphorothioate
  modified_base 3: mod_base = OTHER; note = 2'-O-methyluridine-3'-phosphate
  modified_base 4: mod_base = OTHER; note = 2'-O-methylcytidine-3'-phosphate
  modified_base 5: mod_base = OTHER; note = 2'-O-methyladenosine-3'-phosphate
  modified_base 6: mod_base = OTHER; note = 2'-fluorocytidine-3'-phosphate
  modified_base 7: mod_base = OTHER; note = 2'-O-methyladenosine-3'-phosphate
  modified_base 8: mod_base = OTHER; note = 2'-fluoroadenosine-3'-phosphate
  modified_base 9: mod_base = OTHER; note = 2'-fluoroadenosine-3'-phosphate
  modified_base 10: mod_base = OTHER; note = 2'-O-methylcytidine-3'-phosphate
  modified_base 11: mod_base = OTHER; note = 2'-O-methyladenosine-3'-phosphate
  modified_base 12: mod_base = OTHER; note = 2'-O-methyladenosine-3'-phosphate
  modified_base 13: mod_base = OTHER; note = 2'-O-methylguanosine-3'-phosphate
  modified_base 14: mod_base = OTHER; note = 2'-fluorocytidine-3'-phosphate
  modified_base 15: mod_base = OTHER; note = 2'-O-methyluridine-3'-phosphate
  modified_base 16: mod_base = OTHER; note = 2'-fluoroguanosine-3'-phosphate
  modified_base 17: mod_base = OTHER; note = 2'-O-methylguanosine-3'-phosphate
  modified_base 18: mod_base = OTHER; note = 2'-O-methyluridine-3'-phosphate
  modified_base 19: mod_base = OTHER; note = 2'-O-methylcytidine-3'-phosphate
  modified_base 20: mod_base = OTHER; note = 2'-O-methylguanosine-3'-phosphate
  modified_base 21: mod_base = OTHER; note = 2'-O-methylguanosine-3'-phosphorothioate
  modified_base 22: mod_base = OTHER; note = 2'-O-methyluridine-3'-phosphorothioate
  modified_base 23: mod_base = OTHER; note = 2'-O-methyluridine-3'-phosphate
attcacaaacaagctggtcggtt

SEQ ID NO: 3533 - RNA, 23 nt, synthetic construct
  source 1..23: mol_type = other RNA
  modified_base 1: mod_base = OTHER; note = 2'-O-methyladenosine-3'-phosphorothioate
  modified_base 2: mod_base = OTHER; note = 2'-fluorouridine -3'-phosphorothioate
  modified_base 3: mod_base = OTHER; note = 2'-O-methyluridine-3'-phosphate
  modified_base 4: mod_base = OTHER; note = 2'-O-methyluridine-3'-phosphate
  modified_base 5: mod_base = OTHER; note = 2'-O-methylcytidine-3'-phosphate
  modified_base 6: mod_base = OTHER; note = 2'-fluoroadenosine-3'-phosphate
  modified_base 7: mod_base = OTHER; note = 2'-O-methylcytidine-3'-phosphate
  modified_base 8: mod_base = OTHER; note = 2'-fluoroadenosine-3'-phosphate
  modified_base 9: mod_base = OTHER; note = 2'-fluoroadenosine-3'-phosphate
  modified_base 10: mod_base = OTHER; note = 2'-O-methyladenosine-3'-phosphate
  modified_base 11: mod_base = OTHER; note = 2'-O-methylcytidine-3'-phosphate
  modified_base 12: mod_base = OTHER; note = 2'-O-methyladenosine-3'-phosphate
  modified_base 13: mod_base = OTHER; note = 2'-O-methyladenosine-3'-phosphate
  modified_base 14: mod_base = OTHER; note = 2'-fluoroguanosine-3'-phosphate
  modified_base 15: mod_base = OTHER; note = 2'-O-methylcytidine-3'-phosphate
  modified_base 16: mod_base = OTHER; note = 2'-fluorouridine-3'-phosphate
  modified_base 17: mod_base = OTHER; note = 2'-O-methylguanosine-3'-phosphate
  modified_base 18: mod_base = OTHER; note = 2'-O-methylguanosine-3'-phosphate
  modified_base 19: mod_base = OTHER; note = 2'-O-methyluridine-3'-phosphate
  modified_base 20: mod_base = OTHER; note = 2'-O-methylcytidine-3'-phosphate
  modified_base 21: mod_base = OTHER; note = 2'-O-methylguanosine-3'-phosphorothioate
  modified_base 22: mod_base = OTHER; note = 2'-O-methylguanosine-3'-phosphorothioate
  modified_base 23: mod_base = OTHER; note = 2'-O-methyluridine-3'-phosphate
atttcacaaacaagctggtcggt

SEQ ID NO: 3534 - RNA, 23 nt, synthetic construct
  source 1..23: mol_type = other RNA
  modified_base 1: mod_base = OTHER; note = 2'-O-methyladenosine-3'-phosphorothioate
  modified_base 2: mod_base = OTHER; note = 2'-fluoroguanosine-3'-phosphorothioate
  modified_base 3: mod_base = OTHER; note = 2'-O-methyluridine-3'-phosphate
  modified_base 4: mod_base = OTHER; note = 2'-O-methyluridine-3'-phosphate
  modified_base 5: mod_base = OTHER; note = 2'-O-methyluridine-3'-phosphate
  modified_base 6: mod_base = OTHER; note = 2'-fluorocytidine-3'-phosphate
  modified_base 7: mod_base = OTHER; note = 2'-O-methyladenosine-3'-phosphate
  modified_base 8: mod_base = OTHER; note = 2'-fluorocytidine-3'-phosphate
  modified_base 9: mod_base = OTHER; note = 2'-fluoroadenosine-3'-phosphate
  modified_base 10: mod_base = OTHER; note = 2'-O-methyladenosine-3'-phosphate
  modified_base 11: mod_base = OTHER; note = 2'-O-methyladenosine-3'-phosphate
  modified_base 12: mod_base = OTHER; note = 2'-O-methylcytidine-3'-phosphate
  modified_base 13: mod_base = OTHER; note = 2'-O-methyladenosine-3'-phosphate
  modified_base 14: mod_base = OTHER; note = 2'-fluoroadenosine-3'-phosphate
  modified_base 15: mod_base = OTHER; note = 2'-O-methylguanosine-3'-phosphate
  modified_base 16: mod_base = OTHER; note = 2'-fluorocytidine-3'-phosphate
  modified_base 17: mod_base = OTHER; note = 2'-O-methyluridine-3'-phosphate
  modified_base 18: mod_base = OTHER; note = 2'-O-methylguanosine-3'-phosphate
  modified_base 19: mod_base = OTHER; note = 2'-O-methylguanosine-3'-phosphate
  modified_base 20: mod_base = OTHER; note = 2'-O-methyluridine-3'-phosphate
  modified_base 21: mod_base = OTHER; note = 2'-O-methylcytidine-3'-phosphorothioate
  modified_base 22: mod_base = OTHER; note = 2'-O-methylguanosine-3'-phosphorothioate
  modified_base 23: mod_base = OTHER; note = 2'-O-methylguanosine-3'-phosphate
agtttcacaaacaagctggtcgg

SEQ ID NO: 3535 - RNA, 23 nt, synthetic construct
  source 1..23: mol_type = other RNA
  modified_base 1: mod_base = OTHER; note = 2'-O-methyladenosine-3'-phosphorothioate
  modified_base 2: mod_base = OTHER; note = 2'-fluorouridine -3'-phosphorothioate
  modified_base 3: mod_base = OTHER; note = 2'-O-methylguanosine-3'-phosphate
  modified_base 4: mod_base = OTHER; note = 2'-O-methyluridine-3'-phosphate
  modified_base 5: mod_base = OTHER; note = 2'-O-methyluridine-3'-phosphate
  modified_base 6: mod_base = OTHER; note = 2'-fluorouridine-3'-phosphate
  modified_base 7: mod_base = OTHER; note = 2'-O-methylcytidine-3'-phosphate
  modified_base 8: mod_base = OTHER; note = 2'-fluoroadenosine-3'-phosphate
  modified_base 9: mod_base = OTHER; note = 2'-fluorocytidine-3'-phosphate
  modified_base 10: mod_base = OTHER; note = 2'-O-methyladenosine-3'-phosphate
  modified_base 11: mod_base = OTHER; note = 2'-O-methyladenosine-3'-phosphate
  modified_base 12: mod_base = OTHER; note = 2'-O-methyladenosine-3'-phosphate
  modified_base 13: mod_base = OTHER; note = 2'-O-methylcytidine-3'-phosphate
  modified_base 14: mod_base = OTHER; note = 2'-fluoroadenosine-3'-phosphate
  modified_base 15: mod_base = OTHER; note = 2'-O-methyladenosine-3'-phosphate
  modified_base 16: mod_base = OTHER; note = 2'-fluoroguanosine-3'-phosphate
  modified_base 17: mod_base = OTHER; note = 2'-O-methylcytidine-3'-phosphate
  modified_base 18: mod_base = OTHER; note = 2'-O-methyluridine-3'-phosphate
  modified_base 19: mod_base = OTHER; note = 2'-O-methylguanosine-3'-phosphate
  modified_base 20: mod_base = OTHER; note = 2'-O-methylguanosine-3'-phosphate
  modified_base 21: mod_base = OTHER; note = 2'-O-methyluridine-3'-phosphorothioate
  modified_base 22: mod_base = OTHER; note = 2'-O-methylcytidine-3'-phosphorothioate
  modified_base 23: mod_base = OTHER; note = 2'-O-methylguanosine-3'-phosphate
atgtttcacaaacaagctggtcg

SEQ ID NO: 3536 - RNA, 23 nt, synthetic construct
  source 1..23: mol_type = other RNA
  modified_base 1: mod_base = OTHER; note = 2'-O-methyladenosine-3'-phosphorothioate
  modified_base 2: mod_base = OTHER; note = 2'-fluorouridine -3'-phosphorothioate
  modified_base 3: mod_base = OTHER; note = 2'-O-methyluridine-3'-phosphate
  modified_base 4: mod_base = OTHER; note = 2'-O-methylguanosine-3'-phosphate
  modified_base 5: mod_base = OTHER; note = 2'-O-methyluridine-3'-phosphate
  modified_base 6: mod_base = OTHER; note = 2'-fluorouridine-3'-phosphate
  modified_base 7: mod_base = OTHER; note = 2'-O-methyluridine-3'-phosphate
  modified_base 8: mod_base = OTHER; note = 2'-fluorocytidine-3'-phosphate
  modified_base 9: mod_base = OTHER; note = 2'-fluoroadenosine-3'-phosphate
  modified_base 10: mod_base = OTHER; note = 2'-O-methylcytidine-3'-phosphate
  modified_base 11: mod_base = OTHER; note = 2'-O-methyladenosine-3'-phosphate
  modified_base 12: mod_base = OTHER; note = 2'-O-methyladenosine-3'-phosphate
  modified_base 13: mod_base = OTHER; note = 2'-O-methyladenosine-3'-phosphate
  modified_base 14: mod_base = OTHER; note = 2'-fluorocytidine-3'-phosphate
  modified_base 15: mod_base = OTHER; note = 2'-O-methyladenosine-3'-phosphate
  modified_base 16: mod_base = OTHER; note = 2'-fluoroadenosine-3'-phosphate
  modified_base 17: mod_base = OTHER; note = 2'-O-methylguanosine-3'-phosphate
  modified_base 18: mod_base = OTHER; note = 2'-O-methylcytidine-3'-phosphate
  modified_base 19: mod_base = OTHER; note = 2'-O-methyluridine-3'-phosphate
  modified_base 20: mod_base = OTHER; note = 2'-O-methylguanosine-3'-phosphate
  modified_base 21: mod_base = OTHER; note = 2'-O-methylguanosine-3'-phosphorothioate
  modified_base 22: mod_base = OTHER; note = 2'-O-methyluridine-3'-phosphorothioate
  modified_base 23: mod_base = OTHER; note = 2'-O-methylcytidine-3'-phosphate
attgtttcacaaacaagctggtc

SEQ ID NO: 3537 - RNA, 23 nt, synthetic construct
  source 1..23: mol_type = other RNA
  modified_base 1: mod_base = OTHER; note = 2'-O-methyladenosine-3'-phosphorothioate
  modified_base 2: mod_base = OTHER; note = 2'-fluorouridine -3'-phosphorothioate
  modified_base 3: mod_base = OTHER; note = 2'-O-methyluridine-3'-phosphate
  modified_base 4: mod_base = OTHER; note = 2'-O-methyluridine-3'-phosphate
  modified_base 5: mod_base = OTHER; note = 2'-O-methylguanosine-3'-phosphate
  modified_base 6: mod_base = OTHER; note = 2'-fluorouridine-3'-phosphate
  modified_base 7: mod_base = OTHER; note = 2'-O-methyluridine-3'-phosphate
  modified_base 8: mod_base = OTHER; note = 2'-fluorouridine-3'-phosphate
  modified_base 9: mod_base = OTHER; note = 2'-fluorocytidine-3'-phosphate
  modified_base 10: mod_base = OTHER; note = 2'-O-methyladenosine-3'-phosphate
  modified_base 11: mod_base = OTHER; note = 2'-O-methylcytidine-3'-phosphate
  modified_base 12: mod_base = OTHER; note = 2'-O-methyladenosine-3'-phosphate
  modified_base 13: mod_base = OTHER; note = 2'-O-methyladenosine-3'-phosphate
  modified_base 14: mod_base = OTHER; note = 2'-fluoroadenosine-3'-phosphate
  modified_base 15: mod_base = OTHER; note = 2'-O-methylcytidine-3'-phosphate
  modified_base 16: mod_base = OTHER; note = 2'-fluoroadenosine-3'-phosphate
  modified_base 17: mod_base = OTHER; note = 2'-O-methyladenosine-3'-phosphate
  modified_base 18: mod_base = OTHER; note = 2'-O-methylguanosine-3'-phosphate
  modified_base 19: mod_base = OTHER; note = 2'-O-methylcytidine-3'-phosphate
  modified_base 20: mod_base = OTHER; note = 2'-O-methyluridine-3'-phosphate
  modified_base 21: mod_base = OTHER; note = 2'-O-methylguanosine-3'-phosphorothioate
  modified_base 22: mod_base = OTHER; note = 2'-O-methylguanosine-3'-phosphorothioate
  modified_base 23: mod_base = OTHER; note = 2'-O-methyluridine-3'-phosphate
atttgtttcacaaacaagctggt

SEQ ID NO: 3538 - RNA, 23 nt, synthetic construct
  source 1..23: mol_type = other RNA
  modified_base 1: mod_base = OTHER; note = 2'-O-methyladenosine-3'-phosphorothioate
  modified_base 2: mod_base = OTHER; note = 2'-fluorouridine -3'-phosphorothioate
  modified_base 3: mod_base = OTHER; note = 2'-O-methyluridine-3'-phosphate
  modified_base 4: mod_base = OTHER; note = 2'-O-methyluridine-3'-phosphate
  modified_base 5: mod_base = OTHER; note = 2'-O-methyluridine-3'-phosphate
  modified_base 6: mod_base = OTHER; note = 2'-fluoroguanosine-3'-phosphate
  modified_base 7: mod_base = OTHER; note = 2'-O-methyluridine-3'-phosphate
  modified_base 8: mod_base = OTHER; note = 2'-fluorouridine-3'-phosphate
  modified_base 9: mod_base = OTHER; note = 2'-fluorouridine-3'-phosphate
  modified_base 10: mod_base = OTHER; note = 2'-O-methylcytidine-3'-phosphate
  modified_base 11: mod_base = OTHER; note = 2'-O-methyladenosine-3'-phosphate
  modified_base 12: mod_base = OTHER; note = 2'-O-methylcytidine-3'-phosphate
  modified_base 13: mod_base = OTHER; note = 2'-O-methyladenosine-3'-phosphate
  modified_base 14: mod_base = OTHER; note = 2'-fluoroadenosine-3'-phosphate
  modified_base 15: mod_base = OTHER; note = 2'-O-methyladenosine-3'-phosphate
  modified_base 16: mod_base = OTHER; note = 2'-fluorocytidine-3'-phosphate
  modified_base 17: mod_base = OTHER; note = 2'-O-methyladenosine-3'-phosphate
  modified_base 18: mod_base = OTHER; note = 2'-O-methyladenosine-3'-phosphate
  modified_base 19: mod_base = OTHER; note = 2'-O-methylguanosine-3'-phosphate
  modified_base 20: mod_base = OTHER; note = 2'-O-methylcytidine-3'-phosphate
  modified_base 21: mod_base = OTHER; note = 2'-O-methyluridine-3'-phosphorothioate
  modified_base 22: mod_base = OTHER; note = 2'-O-methylguanosine-3'-phosphorothioate
  modified_base 23: mod_base = OTHER; note = 2'-O-methylguanosine-3'-phosphate
attttgtttcacaaacaagctgg

SEQ ID NO: 3539 - RNA, 23 nt, synthetic construct
  source 1..23: mol_type = other RNA
  modified_base 1: mod_base = OTHER; note = 2'-O-methyladenosine-3'-phosphorothioate
  modified_base 2: mod_base = OTHER; note = 2'-fluorouridine -3'-phosphorothioate
  modified_base 3: mod_base = OTHER; note = 2'-O-methyluridine-3'-phosphate
  modified_base 4: mod_base = OTHER; note = 2'-O-methylcytidine-3'-phosphate
  modified_base 5: mod_base = OTHER; note = 2'-O-methyluridine-3'-phosphate
  modified_base 6: mod_base = OTHER; note = 2'-fluorocytidine-3'-phosphate
  modified_base 7: mod_base = OTHER; note = 2'-O-methyladenosine-3'-phosphate
  modified_base 8: mod_base = OTHER; note = 2'-fluoroadenosine-3'-phosphate
  modified_base 9: mod_base = OTHER; note = 2'-fluorocytidine-3'-phosphate
  modified_base 10: mod_base = OTHER; note = 2'-O-methyluridine-3'-phosphate
  modified_base 11: mod_base = OTHER; note = 2'-O-methyluridine-3'-phosphate
  modified_base 12: mod_base = OTHER; note = 2'-O-methylguanosine-3'-phosphate
  modified_base 13: mod_base = OTHER; note = 2'-O-methyladenosine-3'-phosphate
  modified_base 14: mod_base = OTHER; note = 2'-fluoroadenosine-3'-phosphate
  modified_base 15: mod_base = OTHER; note = 2'-O-methyladenosine-3'-phosphate
  modified_base 16: mod_base = OTHER; note = 2'-fluoroadenosine-3'-phosphate
  modified_base 17: mod_base = OTHER; note = 2'-O-methylguanosine-3'-phosphate
  modified_base 18: mod_base = OTHER; note = 2'-O-methylguanosine-3'-phosphate
  modified_base 19: mod_base = OTHER; note = 2'-O-methylguanosine-3'-phosphate
  modified_base 20: mod_base = OTHER; note = 2'-O-methyladenosine-3'-phosphate
  modified_base 21: mod_base = OTHER; note = 2'-O-methyladenosine-3'-phosphorothioate
  modified_base 22: mod_base = OTHER; note = 2'-O-methylcytidine-3'-phosphorothioate
  modified_base 23: mod_base = OTHER; note = 2'-O-methyladenosine-3'-phosphate
attctcaacttgaaaagggaaca

SEQ ID NO: 3540 - RNA, 23 nt, synthetic construct
  source 1..23: mol_type = other RNA
  modified_base 1: mod_base = OTHER; note = 2'-O-methyladenosine-3'-phosphorothioate
  modified_base 2: mod_base = OTHER; note = 2'-fluoroguanosine-3'-phosphorothioate
  modified_base 3: mod_base = OTHER; note = 2'-O-methylcytidine-3'-phosphate
  modified_base 4: mod_base = OTHER; note = 2'-O-methyladenosine-3'-phosphate
  modified_base 5: mod_base = OTHER; note = 2'-O-methyladenosine-3'-phosphate
  modified_base 6: mod_base = OTHER; note = 2'-fluorouridine-3'-phosphate
  modified_base 7: mod_base = OTHER; note = 2'-O-methylguanosine-3'-phosphate
  modified_base 8: mod_base = OTHER; note = 2'-fluorocytidine-3'-phosphate
  modified_base 9: mod_base = OTHER; note = 2'-fluoroadenosine-3'-phosphate
  modified_base 10: mod_base = OTHER; note = 2'-O-methyladenosine-3'-phosphate
  modified_base 11: mod_base = OTHER; note = 2'-O-methyladenosine-3'-phosphate
  modified_base 12: mod_base = OTHER; note = 2'-O-methyladenosine-3'-phosphate
  modified_base 13: mod_base = OTHER; note = 2'-O-methyladenosine-3'-phosphate
  modified_base 14: mod_base = OTHER; note = 2'-fluorouridine-3'-phosphate
  modified_base 15: mod_base = OTHER; note = 2'-O-methylguanosine-3'-phosphate
  modified_base 16: mod_base = OTHER; note = 2'-fluorouridine-3'-phosphate
  modified_base 17: mod_base = OTHER; note = 2'-O-methyladenosine-3'-phosphate
  modified_base 18: mod_base = OTHER; note = 2'-O-methyluridine-3'-phosphate
  modified_base 19: mod_base = OTHER; note = 2'-O-methyladenosine-3'-phosphate
  modified_base 20: mod_base = OTHER; note = 2'-O-methylcytidine-3'-phosphate
  modified_base 21: mod_base = OTHER; note = 2'-O-methyluridine-3'-phosphorothioate
  modified_base 22: mod_base = OTHER; note = 2'-O-methyluridine-3'-phosphorothioate
  modified_base 23: mod_base = OTHER; note = 2'-O-methyluridine-3'-phosphate
agcaatgcaaaaatgtatacttt

SEQ ID NO: 3541 - RNA, 23 nt, synthetic construct
  source 1..23: mol_type = other RNA
  modified_base 1: mod_base = OTHER; note = 2'-O-methyladenosine-3'-phosphorothioate
  modified_base 2: mod_base = OTHER; note = 2'-fluoroadenosine-3'-phosphorothioate
  modified_base 3: mod_base = OTHER; note = 2'-O-methylguanosine-3'-phosphate
  modified_base 4: mod_base = OTHER; note = 2'-O-methylguanosine-3'-phosphate
  modified_base 5: mod_base = OTHER; note = 2'-O-methylcytidine-3'-phosphate
  modified_base 6: mod_base = OTHER; note = 2'-fluoroadenosine-3'-phosphate
  modified_base 7: mod_base = OTHER; note = 2'-O-methyladenosine-3'-phosphate
  modified_base 8: mod_base = OTHER; note = 2'-fluorouridine-3'-phosphate
  modified_base 9: mod_base = OTHER; note = 2'-fluoroguanosine-3'-phosphate
  modified_base 10: mod_base = OTHER; note = 2'-O-methylcytidine-3'-phosphate
  modified_base 11: mod_base = OTHER; note = 2'-O-methyladenosine-3'-phosphate
  modified_base 12: mod_base = OTHER; note = 2'-O-methyladenosine-3'-phosphate
  modified_base 13: mod_base = OTHER; note = 2'-O-methyladenosine-3'-phosphate
  modified_base 14: mod_base = OTHER; note = 2'-fluoroadenosine-3'-phosphate
  modified_base 15: mod_base = OTHER; note = 2'-O-methyladenosine-3'-phosphate
  modified_base 16: mod_base = OTHER; note = 2'-fluorouridine-3'-phosphate
  modified_base 17: mod_base = OTHER; note = 2'-O-methylguanosine-3'-phosphate
  modified_base 18: mod_base = OTHER; note = 2'-O-methyluridine-3'-phosphate
  modified_base 19: mod_base = OTHER; note = 2'-O-methyladenosine-3'-phosphate
  modified_base 20: mod_base = OTHER; note = 2'-O-methyluridine-3'-phosphate
  modified_base 21: mod_base = OTHER; note = 2'-O-methyladenosine-3'-phosphorothioate
  modified_base 22: mod_base = OTHER; note = 2'-O-methylcytidine-3'-phosphorothioate
  modified_base 23: mod_base = OTHER; note = 2'-O-methyluridine-3'-phosphate
aaggcaatgcaaaaatgtatact

SEQ ID NO: 3542 - RNA, 23 nt, synthetic construct
  source 1..23: mol_type = other RNA
  modified_base 1: mod_base = OTHER; note = 2'-O-methyladenosine-3'-phosphorothioate
  modified_base 2: mod_base = OTHER; note = 2'-fluoroguanosine-3'-phosphorothioate
  modified_base 3: mod_base = OTHER; note = 2'-O-methyladenosine-3'-phosphate
  modified_base 4: mod_base = OTHER; note = 2'-O-methylcytidine-3'-phosphate
  modified_base 5: mod_base = OTHER; note = 2'-O-methyladenosine-3'-phosphate
  modified_base 6: mod_base = OTHER; note = 2'-fluorocytidine-3'-phosphate
  modified_base 7: mod_base = OTHER; note = 2'-O-methyluridine-3'-phosphate
  modified_base 8: mod_base = OTHER; note = 2'-fluoroadenosine-3'-phosphate
  modified_base 9: mod_base = OTHER; note = 2'-fluoroadenosine-3'-phosphate
  modified_base 10: mod_base = OTHER; note = 2'-O-methyladenosine-3'-phosphate
  modified_base 11: mod_base = OTHER; note = 2'-O-methyluridine-3'-phosphate
  modified_base 12: mod_base = OTHER; note = 2'-O-methyladenosine-3'-phosphate
  modified_base 13: mod_base = OTHER; note = 2'-O-methylcytidine-3'-phosphate
  modified_base 14: mod_base = OTHER; note = 2'-fluoroadenosine-3'-phosphate
  modified_base 15: mod_base = OTHER; note = 2'-O-methyladenosine-3'-phosphate
  modified_base 16: mod_base = OTHER; note = 2'-fluoroadenosine-3'-phosphate
  modified_base 17: mod_base = OTHER; note = 2'-O-methylcytidine-3'-phosphate
  modified_base 18: mod_base = OTHER; note = 2'-O-methylcytidine-3'-phosphate
  modified_base 19: mod_base = OTHER; note = 2'-O-methylguanosine-3'-phosphate
  modified_base 20: mod_base = OTHER; note = 2'-O-methyladenosine-3'-phosphate
  modified_base 21: mod_base = OTHER; note = 2'-O-methyladenosine-3'-phosphorothioate
  modified_base 22: mod_base = OTHER; note = 2'-O-methylguanosine-3'-phosphorothioate
  modified_base 23: mod_base = OTHER; note = 2'-O-methylguanosine-3'-phosphate
agacactaaatacaaaccgaagg

SEQ ID NO: 3543 - RNA, 23 nt, synthetic construct
  source 1..23: mol_type = other RNA
  modified_base 1: mod_base = OTHER; note = 2'-O-methyladenosine-3'-phosphorothioate
  modified_base 2: mod_base = OTHER; note = 2'-fluoroadenosine-3'-phosphorothioate
  modified_base 3: mod_base = OTHER; note = 2'-O-methylguanosine-3'-phosphate
  modified_base 4: mod_base = OTHER; note = 2'-O-methyladenosine-3'-phosphate
  modified_base 5: mod_base = OTHER; note = 2'-O-methylcytidine-3'-phosphate
  modified_base 6: mod_base = OTHER; note = 2'-fluoroadenosine-3'-phosphate
  modified_base 7: mod_base = OTHER; note = 2'-O-methylcytidine-3'-phosphate
  modified_base 8: mod_base = OTHER; note = 2'-fluorouridine-3'-phosphate
  modified_base 9: mod_base = OTHER; note = 2'-fluoroadenosine-3'-phosphate
  modified_base 10: mod_base = OTHER; note = 2'-O-methyladenosine-3'-phosphate
  modified_base 11: mod_base = OTHER; note = 2'-O-methyladenosine-3'-phosphate
  modified_base 12: mod_base = OTHER; note = 2'-O-methyluridine-3'-phosphate
  modified_base 13: mod_base = OTHER; note = 2'-O-methyladenosine-3'-phosphate
  modified_base 14: mod_base = OTHER; note = 2'-fluorocytidine-3'-phosphate
  modified_base 15: mod_base = OTHER; note = 2'-O-methyladenosine-3'-phosphate
  modified_base 16: mod_base = OTHER; note = 2'-fluoroadenosine-3'-phosphate
  modified_base 17: mod_base = OTHER; note = 2'-O-methyladenosine-3'-phosphate
  modified_base 18: mod_base = OTHER; note = 2'-O-methylcytidine-3'-phosphate
  modified_base 19: mod_base = OTHER; note = 2'-O-methylcytidine-3'-phosphate
  modified_base 20: mod_base = OTHER; note = 2'-O-methylguanosine-3'-phosphate
  modified_base 21: mod_base = OTHER; note = 2'-O-methyladenosine-3'-phosphorothioate
  modified_base 22: mod_base = OTHER; note = 2'-O-methyladenosine-3'-phosphorothioate
  modified_base 23: mod_base = OTHER; note = 2'-O-methylguanosine-3'-phosphate
aagacactaaatacaaaccgaag

SEQ ID NO: 3544 - RNA, 23 nt, synthetic construct
  source 1..23: mol_type = other RNA
  modified_base 1: mod_base = OTHER; note = 2'-O-methyladenosine-3'-phosphorothioate
  modified_base 2: mod_base = OTHER; note = 2'-fluoroadenosine-3'-phosphorothioate
  modified_base 3: mod_base = OTHER; note = 2'-O-methyladenosine-3'-phosphate
  modified_base 4: mod_base = OTHER; note = 2'-O-methylguanosine-3'-phosphate
  modified_base 5: mod_base = OTHER; note = 2'-O-methyladenosine-3'-phosphate
  modified_base 6: mod_base = OTHER; note = 2'-fluorocytidine-3'-phosphate
  modified_base 7: mod_base = OTHER; note = 2'-O-methyladenosine-3'-phosphate
  modified_base 8: mod_base = OTHER; note = 2'-fluorocytidine-3'-phosphate
  modified_base 9: mod_base = OTHER; note = 2'-fluorouridine-3'-phosphate
  modified_base 10: mod_base = OTHER; note = 2'-O-methyladenosine-3'-phosphate
  modified_base 11: mod_base = OTHER; note = 2'-O-methyladenosine-3'-phosphate
  modified_base 12: mod_base = OTHER; note = 2'-O-methyladenosine-3'-phosphate
  modified_base 13: mod_base = OTHER; note = 2'-O-methyluridine-3'-phosphate
  modified_base 14: mod_base = OTHER; note = 2'-fluoroadenosine-3'-phosphate
  modified_base 15: mod_base = OTHER; note = 2'-O-methylcytidine-3'-phosphate
  modified_base 16: mod_base = OTHER; note = 2'-fluoroadenosine-3'-phosphate
  modified_base 17: mod_base = OTHER; note = 2'-O-methyladenosine-3'-phosphate
  modified_base 18: mod_base = OTHER; note = 2'-O-methyladenosine-3'-phosphate
  modified_base 19: mod_base = OTHER; note = 2'-O-methylcytidine-3'-phosphate
  modified_base 20: mod_base = OTHER; note = 2'-O-methylcytidine-3'-phosphate
  modified_base 21: mod_base = OTHER; note = 2'-O-methylguanosine-3'-phosphorothioate
  modified_base 22: mod_base = OTHER; note = 2'-O-methyladenosine-3'-phosphorothioate
  modified_base 23: mod_base = OTHER; note = 2'-O-methyladenosine-3'-phosphate
aaagacactaaatacaaaccgaa

SEQ ID NO: 3545 - RNA, 23 nt, synthetic construct
  source 1..23: mol_type = other RNA
  modified_base 1: mod_base = OTHER; note = 2'-O-methyladenosine-3'-phosphorothioate
  modified_base 2: mod_base = OTHER; note = 2'-fluorouridine -3'-phosphorothioate
  modified_base 3: mod_base = OTHER; note = 2'-O-methylcytidine-3'-phosphate
  modified_base 4: mod_base = OTHER; note = 2'-O-methyladenosine-3'-phosphate
  modified_base 5: mod_base = OTHER; note = 2'-O-methyladenosine-3'-phosphate
  modified_base 6: mod_base = OTHER; note = 2'-fluoroguanosine-3'-phosphate
  modified_base 7: mod_base = OTHER; note = 2'-O-methyladenosine-3'-phosphate
  modified_base 8: mod_base = OTHER; note = 2'-fluorocytidine-3'-phosphate
  modified_base 9: mod_base = OTHER; note = 2'-fluoroadenosine-3'-phosphate
  modified_base 10: mod_base = OTHER; note = 2'-O-methylcytidine-3'-phosphate
  modified_base 11: mod_base = OTHER; note = 2'-O-methyluridine-3'-phosphate
  modified_base 12: mod_base = OTHER; note = 2'-O-methyladenosine-3'-phosphate
  modified_base 13: mod_base = OTHER; note = 2'-O-methyladenosine-3'-phosphate
  modified_base 14: mod_base = OTHER; note = 2'-fluoroadenosine-3'-phosphate
  modified_base 15: mod_base = OTHER; note = 2'-O-methyluridine-3'-phosphate
  modified_base 16: mod_base = OTHER; note = 2'-fluoroadenosine-3'-phosphate
  modified_base 17: mod_base = OTHER; note = 2'-O-methylcytidine-3'-phosphate
  modified_base 18: mod_base = OTHER; note = 2'-O-methyladenosine-3'-phosphate
  modified_base 19: mod_base = OTHER; note = 2'-O-methyladenosine-3'-phosphate
  modified_base 20: mod_base = OTHER; note = 2'-O-methyladenosine-3'-phosphate
  modified_base 21: mod_base = OTHER; note = 2'-O-methylcytidine-3'-phosphorothioate
  modified_base 22: mod_base = OTHER; note = 2'-O-methylcytidine-3'-phosphorothioate
  modified_base 23: mod_base = OTHER; note = 2'-O-methylguanosine-3'-phosphate
atcaagacactaaatacaaaccg

SEQ ID NO: 3546 - RNA, 23 nt, synthetic construct
  source 1..23: mol_type = other RNA
  modified_base 1: mod_base = OTHER; note = 2'-O-methyladenosine-3'-phosphorothioate
  modified_base 2: mod_base = OTHER; note = 2'-fluorouridine -3'-phosphorothioate
  modified_base 3: mod_base = OTHER; note = 2'-O-methyluridine-3'-phosphate
  modified_base 4: mod_base = OTHER; note = 2'-O-methylcytidine-3'-phosphate
  modified_base 5: mod_base = OTHER; note = 2'-O-methyladenosine-3'-phosphate
  modified_base 6: mod_base = OTHER; note = 2'-fluoroadenosine-3'-phosphate
  modified_base 7: mod_base = OTHER; note = 2'-O-methylguanosine-3'-phosphate
  modified_base 8: mod_base = OTHER; note = 2'-fluoroadenosine-3'-phosphate
  modified_base 9: mod_base = OTHER; note = 2'-fluorocytidine-3'-phosphate
  modified_base 10: mod_base = OTHER; note = 2'-O-methyladenosine-3'-phosphate
  modified_base 11: mod_base = OTHER; note = 2'-O-methylcytidine-3'-phosphate
  modified_base 12: mod_base = OTHER; note = 2'-O-methyluridine-3'-phosphate
  modified_base 13: mod_base = OTHER; note = 2'-O-methyladenosine-3'-phosphate
  modified_base 14: mod_base = OTHER; note = 2'-fluoroadenosine-3'-phosphate
  modified_base 15: mod_base = OTHER; note = 2'-O-methyladenosine-3'-phosphate
  modified_base 16: mod_base = OTHER; note = 2'-fluorouridine-3'-phosphate
  modified_base 17: mod_base = OTHER; note = 2'-O-methyladenosine-3'-phosphate
  modified_base 18: mod_base = OTHER; note = 2'-O-methylcytidine-3'-phosphate
  modified_base 19: mod_base = OTHER; note = 2'-O-methyladenosine-3'-phosphate
  modified_base 20: mod_base = OTHER; note = 2'-O-methyladenosine-3'-phosphate
  modified_base 21: mod_base = OTHER; note = 2'-O-methyladenosine-3'-phosphorothioate
  modified_base 22: mod_base = OTHER; note = 2'-O-methylcytidine-3'-phosphorothioate
  modified_base 23: mod_base = OTHER; note = 2'-O-methylcytidine-3'-phosphate
attcaagacactaaatacaaacc

SEQ ID NO: 3547 - RNA, 23 nt, synthetic construct
  source 1..23: mol_type = other RNA
  modified_base 1: mod_base = OTHER; note = 2'-O-methyladenosine-3'-phosphorothioate
  modified_base 2: mod_base = OTHER; note = 2'-fluoroadenosine-3'-phosphorothioate
  modified_base 3: mod_base = OTHER; note = 2'-O-methyluridine-3'-phosphate
  modified_base 4: mod_base = OTHER; note = 2'-O-methyluridine-3'-phosphate
  modified_base 5: mod_base = OTHER; note = 2'-O-methylcytidine-3'-phosphate
  modified_base 6: mod_base = OTHER; note = 2'-fluoroadenosine-3'-phosphate
  modified_base 7: mod_base = OTHER; note = 2'-O-methyladenosine-3'-phosphate
  modified_base 8: mod_base = OTHER; note = 2'-fluoroguanosine-3'-phosphate
  modified_base 9: mod_base = OTHER; note = 2'-fluoroadenosine-3'-phosphate
  modified_base 10: mod_base = OTHER; note = 2'-O-methylcytidine-3'-phosphate
  modified_base 11: mod_base = OTHER; note = 2'-O-methyladenosine-3'-phosphate
  modified_base 12: mod_base = OTHER; note = 2'-O-methylcytidine-3'-phosphate
  modified_base 13: mod_base = OTHER; note = 2'-O-methyluridine-3'-phosphate
  modified_base 14: mod_base = OTHER; note = 2'-fluoroadenosine-3'-phosphate
  modified_base 15: mod_base = OTHER; note = 2'-O-methyladenosine-3'-phosphate
  modified_base 16: mod_base = OTHER; note = 2'-fluoroadenosine-3'-phosphate
  modified_base 17: mod_base = OTHER; note = 2'-O-methyluridine-3'-phosphate
  modified_base 18: mod_base = OTHER; note = 2'-O-methyladenosine-3'-phosphate
  modified_base 19: mod_base = OTHER; note = 2'-O-methylcytidine-3'-phosphate
  modified_base 20: mod_base = OTHER; note = 2'-O-methyladenosine-3'-phosphate
  modified_base 21: mod_base = OTHER; note = 2'-O-methyladenosine-3'-phosphorothioate
  modified_base 22: mod_base = OTHER; note = 2'-O-methyladenosine-3'-phosphorothioate
  modified_base 23: mod_base = OTHER; note = 2'-O-methylcytidine-3'-phosphate
aattcaagacactaaatacaaac

SEQ ID NO: 3548 - RNA, 23 nt, synthetic construct
  source 1..23: mol_type = other RNA
  modified_base 1: mod_base = OTHER; note = 2'-O-methyladenosine-3'-phosphorothioate
  modified_base 2: mod_base = OTHER; note = 2'-fluoroadenosine-3'-phosphorothioate
  modified_base 3: mod_base = OTHER; note = 2'-O-methylcytidine-3'-phosphate
  modified_base 4: mod_base = OTHER; note = 2'-O-methyladenosine-3'-phosphate
  modified_base 5: mod_base = OTHER; note = 2'-O-methyluridine-3'-phosphate
  modified_base 6: mod_base = OTHER; note = 2'-fluorouridine-3'-phosphate
  modified_base 7: mod_base = OTHER; note = 2'-O-methylcytidine-3'-phosphate
  modified_base 8: mod_base = OTHER; note = 2'-fluoroadenosine-3'-phosphate
  modified_base 9: mod_base = OTHER; note = 2'-fluoroadenosine-3'-phosphate
  modified_base 10: mod_base = OTHER; note = 2'-O-methylguanosine-3'-phosphate
  modified_base 11: mod_base = OTHER; note = 2'-O-methyladenosine-3'-phosphate
  modified_base 12: mod_base = OTHER; note = 2'-O-methylcytidine-3'-phosphate
  modified_base 13: mod_base = OTHER; note = 2'-O-methyladenosine-3'-phosphate
  modified_base 14: mod_base = OTHER; note = 2'-fluorocytidine-3'-phosphate
  modified_base 15: mod_base = OTHER; note = 2'-O-methyluridine-3'-phosphate
  modified_base 16: mod_base = OTHER; note = 2'-fluoroadenosine-3'-phosphate
  modified_base 17: mod_base = OTHER; note = 2'-O-methyladenosine-3'-phosphate
  modified_base 18: mod_base = OTHER; note = 2'-O-methyladenosine-3'-phosphate
  modified_base 19: mod_base = OTHER; note = 2'-O-methyluridine-3'-phosphate
  modified_base 20: mod_base = OTHER; note = 2'-O-methyladenosine-3'-phosphate
  modified_base 21: mod_base = OTHER; note = 2'-O-methylcytidine-3'-phosphorothioate
  modified_base 22: mod_base = OTHER; note = 2'-O-methyladenosine-3'-phosphorothioate
  modified_base 23: mod_base = OTHER; note = 2'-O-methyladenosine-3'-phosphate
aacattcaagacactaaatacaa

SEQ ID NO: 3549 - RNA, 23 nt, synthetic construct
  source 1..23: mol_type = other RNA
  modified_base 1: mod_base = OTHER; note = 2'-O-methyladenosine-3'-phosphorothioate
  modified_base 2: mod_base = OTHER; note = 2'-fluorouridine -3'-phosphorothioate
  modified_base 3: mod_base = OTHER; note = 2'-O-methyluridine-3'-phosphate
  modified_base 4: mod_base = OTHER; note = 2'-O-methyladenosine-3'-phosphate
  modified_base 5: mod_base = OTHER; note = 2'-O-methylcytidine-3'-phosphate
  modified_base 6: mod_base = OTHER; note = 2'-fluoroadenosine-3'-phosphate
  modified_base 7: mod_base = OTHER; note = 2'-O-methyluridine-3'-phosphate
  modified_base 8: mod_base = OTHER; note = 2'-fluorouridine-3'-phosphate
  modified_base 9: mod_base = OTHER; note = 2'-fluorocytidine-3'-phosphate
  modified_base 10: mod_base = OTHER; note = 2'-O-methyladenosine-3'-phosphate
  modified_base 11: mod_base = OTHER; note = 2'-O-methyladenosine-3'-phosphate
  modified_base 12: mod_base = OTHER; note = 2'-O-methylguanosine-3'-phosphate
  modified_base 13: mod_base = OTHER; note = 2'-O-methyladenosine-3'-phosphate
  modified_base 14: mod_base = OTHER; note = 2'-fluorocytidine-3'-phosphate
  modified_base 15: mod_base = OTHER; note = 2'-O-methyladenosine-3'-phosphate
  modified_base 16: mod_base = OTHER; note = 2'-fluorocytidine-3'-phosphate
  modified_base 17: mod_base = OTHER; note = 2'-O-methyluridine-3'-phosphate
  modified_base 18: mod_base = OTHER; note = 2'-O-methyladenosine-3'-phosphate
  modified_base 19: mod_base = OTHER; note = 2'-O-methyladenosine-3'-phosphate
  modified_base 20: mod_base = OTHER; note = 2'-O-methyladenosine-3'-phosphate
  modified_base 21: mod_base = OTHER; note = 2'-O-methyluridine-3'-phosphorothioate
  modified_base 22: mod_base = OTHER; note = 2'-O-methyladenosine-3'-phosphorothioate
  modified_base 23: mod_base = OTHER; note = 2'-O-methylcytidine-3'-phosphate
attacattcaagacactaaatac

SEQ ID NO: 3550 - RNA, 23 nt, synthetic construct
  source 1..23: mol_type = other RNA
  modified_base 1: mod_base = OTHER; note = 2'-O-methyladenosine-3'-phosphorothioate
  modified_base 2: mod_base = OTHER; note = 2'-fluorouridine -3'-phosphorothioate
  modified_base 3: mod_base = OTHER; note = 2'-O-methylcytidine-3'-phosphate
  modified_base 4: mod_base = OTHER; note = 2'-O-methyluridine-3'-phosphate
  modified_base 5: mod_base = OTHER; note = 2'-O-methyluridine-3'-phosphate
  modified_base 6: mod_base = OTHER; note = 2'-fluoroadenosine-3'-phosphate
  modified_base 7: mod_base = OTHER; note = 2'-O-methylcytidine-3'-phosphate
  modified_base 8: mod_base = OTHER; note = 2'-fluoroadenosine-3'-phosphate
  modified_base 9: mod_base = OTHER; note = 2'-fluorouridine-3'-phosphate
  modified_base 10: mod_base = OTHER; note = 2'-O-methyluridine-3'-phosphate
  modified_base 11: mod_base = OTHER; note = 2'-O-methylcytidine-3'-phosphate
  modified_base 12: mod_base = OTHER; note = 2'-O-methyladenosine-3'-phosphate
  modified_base 13: mod_base = OTHER; note = 2'-O-methyladenosine-3'-phosphate
  modified_base 14: mod_base = OTHER; note = 2'-fluoroguanosine-3'-phosphate
  modified_base 15: mod_base = OTHER; note = 2'-O-methyladenosine-3'-phosphate
  modified_base 16: mod_base = OTHER; note = 2'-fluorocytidine-3'-phosphate
  modified_base 17: mod_base = OTHER; note = 2'-O-methyladenosine-3'-phosphate
  modified_base 18: mod_base = OTHER; note = 2'-O-methylcytidine-3'-phosphate
  modified_base 19: mod_base = OTHER; note = 2'-O-methyluridine-3'-phosphate
  modified_base 20: mod_base = OTHER; note = 2'-O-methyladenosine-3'-phosphate
  modified_base 21: mod_base = OTHER; note = 2'-O-methyladenosine-3'-phosphorothioate
  modified_base 22: mod_base = OTHER; note = 2'-O-methyladenosine-3'-phosphorothioate
  modified_base 23: mod_base = OTHER; note = 2'-O-methyluridine-3'-phosphate
atcttacattcaagacactaaat

SEQ ID NO: 3551 - RNA, 23 nt, synthetic construct
  source 1..23: mol_type = other RNA
  modified_base 1: mod_base = OTHER; note = 2'-O-methyladenosine-3'-phosphorothioate
  modified_base 2: mod_base = OTHER; note = 2'-fluorouridine -3'-phosphorothioate
  modified_base 3: mod_base = OTHER; note = 2'-O-methyluridine-3'-phosphate
  modified_base 4: mod_base = OTHER; note = 2'-O-methylcytidine-3'-phosphate
  modified_base 5: mod_base = OTHER; note = 2'-O-methyluridine-3'-phosphate
  modified_base 6: mod_base = OTHER; note = 2'-fluorouridine-3'-phosphate
  modified_base 7: mod_base = OTHER; note = 2'-O-methyladenosine-3'-phosphate
  modified_base 8: mod_base = OTHER; note = 2'-fluorocytidine-3'-phosphate
  modified_base 9: mod_base = OTHER; note = 2'-fluoroadenosine-3'-phosphate
  modified_base 10: mod_base = OTHER; note = 2'-O-methyluridine-3'-phosphate
  modified_base 11: mod_base = OTHER; note = 2'-O-methyluridine-3'-phosphate
  modified_base 12: mod_base = OTHER; note = 2'-O-methylcytidine-3'-phosphate
  modified_base 13: mod_base = OTHER; note = 2'-O-methyladenosine-3'-phosphate
  modified_base 14: mod_base = OTHER; note = 2'-fluoroadenosine-3'-phosphate
  modified_base 15: mod_base = OTHER; note = 2'-O-methylguanosine-3'-phosphate
  modified_base 16: mod_base = OTHER; note = 2'-fluoroadenosine-3'-phosphate
  modified_base 17: mod_base = OTHER; note = 2'-O-methylcytidine-3'-phosphate
  modified_base 18: mod_base = OTHER; note = 2'-O-methyladenosine-3'-phosphate
  modified_base 19: mod_base = OTHER; note = 2'-O-methylcytidine-3'-phosphate
  modified_base 20: mod_base = OTHER; note = 2'-O-methyluridine-3'-phosphate
  modified_base 21: mod_base = OTHER; note = 2'-O-methyladenosine-3'-phosphorothioate
  modified_base 22: mod_base = OTHER; note = 2'-O-methyladenosine-3'-phosphorothioate
  modified_base 23: mod_base = OTHER; note = 2'-O-methyladenosine-3'-phosphate
attcttacattcaagacactaaa

SEQ ID NO: 3552 - RNA, 23 nt, synthetic construct
  source 1..23: mol_type = other RNA
  modified_base 1: mod_base = OTHER; note = 2'-O-methyladenosine-3'-phosphorothioate
  modified_base 2: mod_base = OTHER; note = 2'-fluoroguanosine-3'-phosphorothioate
  modified_base 3: mod_base = OTHER; note = 2'-O-methyluridine-3'-phosphate
  modified_base 4: mod_base = OTHER; note = 2'-O-methyluridine-3'-phosphate
  modified_base 5: mod_base = OTHER; note = 2'-O-methylcytidine-3'-phosphate
  modified_base 6: mod_base = OTHER; note = 2'-fluorouridine-3'-phosphate
  modified_base 7: mod_base = OTHER; note = 2'-O-methyluridine-3'-phosphate
  modified_base 8: mod_base = OTHER; note = 2'-fluoroadenosine-3'-phosphate
  modified_base 9: mod_base = OTHER; note = 2'-fluorocytidine-3'-phosphate
  modified_base 10: mod_base = OTHER; note = 2'-O-methyladenosine-3'-phosphate
  modified_base 11: mod_base = OTHER; note = 2'-O-methyluridine-3'-phosphate
  modified_base 12: mod_base = OTHER; note = 2'-O-methyluridine-3'-phosphate
  modified_base 13: mod_base = OTHER; note = 2'-O-methylcytidine-3'-phosphate
  modified_base 14: mod_base = OTHER; note = 2'-fluoroadenosine-3'-phosphate
  modified_base 15: mod_base = OTHER; note = 2'-O-methyladenosine-3'-phosphate
  modified_base 16: mod_base = OTHER; note = 2'-fluoroguanosine-3'-phosphate
  modified_base 17: mod_base = OTHER; note = 2'-O-methyladenosine-3'-phosphate
  modified_base 18: mod_base = OTHER; note = 2'-O-methylcytidine-3'-phosphate
  modified_base 19: mod_base = OTHER; note = 2'-O-methyladenosine-3'-phosphate
  modified_base 20: mod_base = OTHER; note = 2'-O-methylcytidine-3'-phosphate
  modified_base 21: mod_base = OTHER; note = 2'-O-methyluridine-3'-phosphorothioate
  modified_base 22: mod_base = OTHER; note = 2'-O-methyladenosine-3'-phosphorothioate
  modified_base 23: mod_base = OTHER; note = 2'-O-methyladenosine-3'-phosphate
agttcttacattcaagacactaa

SEQ ID NO: 3553 - RNA, 23 nt, synthetic construct
  source 1..23: mol_type = other RNA
  modified_base 1: mod_base = OTHER; note = 2'-O-methyladenosine-3'-phosphorothioate
  modified_base 2: mod_base = OTHER; note = 2'-fluoroadenosine-3'-phosphorothioate
  modified_base 3: mod_base = OTHER; note = 2'-O-methyluridine-3'-phosphate
  modified_base 4: mod_base = OTHER; note = 2'-O-methylguanosine-3'-phosphate
  modified_base 5: mod_base = OTHER; note = 2'-O-methyluridine-3'-phosphate
  modified_base 6: mod_base = OTHER; note = 2'-fluorouridine-3'-phosphate
  modified_base 7: mod_base = OTHER; note = 2'-O-methylcytidine-3'-phosphate
  modified_base 8: mod_base = OTHER; note = 2'-fluorouridine-3'-phosphate
  modified_base 9: mod_base = OTHER; note = 2'-fluorouridine-3'-phosphate
  modified_base 10: mod_base = OTHER; note = 2'-O-methyladenosine-3'-phosphate
  modified_base 11: mod_base = OTHER; note = 2'-O-methylcytidine-3'-phosphate
  modified_base 12: mod_base = OTHER; note = 2'-O-methyladenosine-3'-phosphate
  modified_base 13: mod_base = OTHER; note = 2'-O-methyluridine-3'-phosphate
  modified_base 14: mod_base = OTHER; note = 2'-fluorouridine-3'-phosphate
  modified_base 15: mod_base = OTHER; note = 2'-O-methylcytidine-3'-phosphate
  modified_base 16: mod_base = OTHER; note = 2'-fluoroadenosine-3'-phosphate
  modified_base 17: mod_base = OTHER; note = 2'-O-methyladenosine-3'-phosphate
  modified_base 18: mod_base = OTHER; note = 2'-O-methylguanosine-3'-phosphate
  modified_base 19: mod_base = OTHER; note = 2'-O-methyladenosine-3'-phosphate
  modified_base 20: mod_base = OTHER; note = 2'-O-methylcytidine-3'-phosphate
  modified_base 21: mod_base = OTHER; note = 2'-O-methyladenosine-3'-phosphorothioate
  modified_base 22: mod_base = OTHER; note = 2'-O-methylcytidine-3'-phosphorothioate
  modified_base 23: mod_base = OTHER; note = 2'-O-methyluridine-3'-phosphate
aatgttcttacattcaagacact

SEQ ID NO: 3554 - RNA, 23 nt, synthetic construct
  source 1..23: mol_type = other RNA
  modified_base 1: mod_base = OTHER; note = 2'-O-methyladenosine-3'-phosphorothioate
  modified_base 2: mod_base = OTHER; note = 2'-fluoroguanosine-3'-phosphorothioate
  modified_base 3: mod_base = OTHER; note = 2'-O-methylguanosine-3'-phosphate
  modified_base 4: mod_base = OTHER; note = 2'-O-methyluridine-3'-phosphate
  modified_base 5: mod_base = OTHER; note = 2'-O-methylcytidine-3'-phosphate
  modified_base 6: mod_base = OTHER; note = 2'-fluoroadenosine-3'-phosphate
  modified_base 7: mod_base = OTHER; note = 2'-O-methyluridine-3'-phosphate
  modified_base 8: mod_base = OTHER; note = 2'-fluoroguanosine-3'-phosphate
  modified_base 9: mod_base = OTHER; note = 2'-fluorouridine-3'-phosphate
  modified_base 10: mod_base = OTHER; note = 2'-O-methyluridine-3'-phosphate
  modified_base 11: mod_base = OTHER; note = 2'-O-methylcytidine-3'-phosphate
  modified_base 12: mod_base = OTHER; note = 2'-O-methyluridine-3'-phosphate
  modified_base 13: mod_base = OTHER; note = 2'-O-methyluridine-3'-phosphate
  modified_base 14: mod_base = OTHER; note = 2'-fluoroadenosine-3'-phosphate
  modified_base 15: mod_base = OTHER; note = 2'-O-methylcytidine-3'-phosphate
  modified_base 16: mod_base = OTHER; note = 2'-fluoroadenosine-3'-phosphate
  modified_base 17: mod_base = OTHER; note = 2'-O-methyluridine-3'-phosphate
  modified_base 18: mod_base = OTHER; note = 2'-O-methyluridine-3'-phosphate
  modified_base 19: mod_base = OTHER; note = 2'-O-methylcytidine-3'-phosphate
  modified_base 20: mod_base = OTHER; note = 2'-O-methyladenosine-3'-phosphate
  modified_base 21: mod_base = OTHER; note = 2'-O-methyladenosine-3'-phosphorothioate
  modified_base 22: mod_base = OTHER; note = 2'-O-methylguanosine-3'-phosphorothioate
  modified_base 23: mod_base = OTHER; note = 2'-O-methyladenosine-3'-phosphate
aggtcatgttcttacattcaaga

SEQ ID NO: 3555 - RNA, 23 nt, synthetic construct
  source 1..23: mol_type = other RNA
  modified_base 1: mod_base = OTHER; note = 2'-O-methyladenosine-3'-phosphorothioate
  modified_base 2: mod_base = OTHER; note = 2'-fluoroguanosine-3'-phosphorothioate
  modified_base 3: mod_base = OTHER; note = 2'-O-methyladenosine-3'-phosphate
  modified_base 4: mod_base = OTHER; note = 2'-O-methylcytidine-3'-phosphate
  modified_base 5: mod_base = OTHER; note = 2'-O-methyladenosine-3'-phosphate
  modified_base 6: mod_base = OTHER; note = 2'-fluorocytidine-3'-phosphate
  modified_base 7: mod_base = OTHER; note = 2'-O-methyluridine-3'-phosphate
  modified_base 8: mod_base = OTHER; note = 2'-fluoroadenosine-3'-phosphate
  modified_base 9: mod_base = OTHER; note = 2'-fluorocytidine-3'-phosphate
  modified_base 10: mod_base = OTHER; note = 2'-O-methyladenosine-3'-phosphate
  modified_base 11: mod_base = OTHER; note = 2'-O-methylcytidine-3'-phosphate
  modified_base 12: mod_base = OTHER; note = 2'-O-methylguanosine-3'-phosphate
  modified_base 13: mod_base = OTHER; note = 2'-O-methylguanosine-3'-phosphate
  modified_base 14: mod_base = OTHER; note = 2'-fluoroadenosine-3'-phosphate
  modified_base 15: mod_base = OTHER; note = 2'-O-methylguanosine-3'-phosphate
  modified_base 16: mod_base = OTHER; note = 2'-fluoroguanosine-3'-phosphate
  modified_base 17: mod_base = OTHER; note = 2'-O-methyluridine-3'-phosphate
  modified_base 18: mod_base = OTHER; note = 2'-O-methylcytidine-3'-phosphate
  modified_base 19: mod_base = OTHER; note = 2'-O-methyladenosine-3'-phosphate
  modified_base 20: mod_base = OTHER; note = 2'-O-methyluridine-3'-phosphate
  modified_base 21: mod_base = OTHER; note = 2'-O-methylguanosine-3'-phosphorothioate
  modified_base 22: mod_base = OTHER; note = 2'-O-methyluridine-3'-phosphorothioate
  modified_base 23: mod_base = OTHER; note = 2'-O-methyluridine-3'-phosphate
agacactacacggaggtcatgtt

SEQ ID NO: 3556 - RNA, 23 nt, synthetic construct
  source 1..23: mol_type = other RNA
  modified_base 1: mod_base = OTHER; note = 2'-O-methyladenosine-3'-phosphorothioate
  modified_base 2: mod_base = OTHER; note = 2'-fluoroadenosine-3'-phosphorothioate
  modified_base 3: mod_base = OTHER; note = 2'-O-methylguanosine-3'-phosphate
  modified_base 4: mod_base = OTHER; note = 2'-O-methyladenosine-3'-phosphate
  modified_base 5: mod_base = OTHER; note = 2'-O-methylcytidine-3'-phosphate
  modified_base 6: mod_base = OTHER; note = 2'-fluoroadenosine-3'-phosphate
  modified_base 7: mod_base = OTHER; note = 2'-O-methylcytidine-3'-phosphate
  modified_base 8: mod_base = OTHER; note = 2'-fluorouridine-3'-phosphate
  modified_base 9: mod_base = OTHER; note = 2'-fluoroadenosine-3'-phosphate
  modified_base 10: mod_base = OTHER; note = 2'-O-methylcytidine-3'-phosphate
  modified_base 11: mod_base = OTHER; note = 2'-O-methyladenosine-3'-phosphate
  modified_base 12: mod_base = OTHER; note = 2'-O-methylcytidine-3'-phosphate
  modified_base 13: mod_base = OTHER; note = 2'-O-methylguanosine-3'-phosphate
  modified_base 14: mod_base = OTHER; note = 2'-fluoroguanosine-3'-phosphate
  modified_base 15: mod_base = OTHER; note = 2'-O-methyladenosine-3'-phosphate
  modified_base 16: mod_base = OTHER; note = 2'-fluoroguanosine-3'-phosphate
  modified_base 17: mod_base = OTHER; note = 2'-O-methylguanosine-3'-phosphate
  modified_base 18: mod_base = OTHER; note = 2'-O-methyluridine-3'-phosphate
  modified_base 19: mod_base = OTHER; note = 2'-O-methylcytidine-3'-phosphate
  modified_base 20: mod_base = OTHER; note = 2'-O-methyladenosine-3'-phosphate
  modified_base 21: mod_base = OTHER; note = 2'-O-methyluridine-3'-phosphorothioate
  modified_base 22: mod_base = OTHER; note = 2'-O-methylguanosine-3'-phosphorothioate
  modified_base 23: mod_base = OTHER; note = 2'-O-methyluridine-3'-phosphate
aagacactacacggaggtcatgt

SEQ ID NO: 3557 - RNA, 23 nt, synthetic construct
  source 1..23: mol_type = other RNA
  modified_base 1: mod_base = OTHER; note = 2'-O-methyladenosine-3'-phosphorothioate
  modified_base 2: mod_base = OTHER; note = 2'-fluoroadenosine-3'-phosphorothioate
  modified_base 3: mod_base = OTHER; note = 2'-O-methyladenosine-3'-phosphate
  modified_base 4: mod_base = OTHER; note = 2'-O-methyluridine-3'-phosphate
  modified_base 5: mod_base = OTHER; note = 2'-O-methylcytidine-3'-phosphate
  modified_base 6: mod_base = OTHER; note = 2'-fluoroadenosine-3'-phosphate
  modified_base 7: mod_base = OTHER; note = 2'-O-methylcytidine-3'-phosphate
  modified_base 8: mod_base = OTHER; note = 2'-fluoroadenosine-3'-phosphate
  modified_base 9: mod_base = OTHER; note = 2'-fluoroadenosine-3'-phosphate
  modified_base 10: mod_base = OTHER; note = 2'-O-methylguanosine-3'-phosphate
  modified_base 11: mod_base = OTHER; note = 2'-O-methylcytidine-3'-phosphate
  modified_base 12: mod_base = OTHER; note = 2'-O-methyladenosine-3'-phosphate
  modified_base 13: mod_base = OTHER; note = 2'-O-methyluridine-3'-phosphate
  modified_base 14: mod_base = OTHER; note = 2'-fluorocytidine-3'-phosphate
  modified_base 15: mod_base = OTHER; note = 2'-O-methyluridine-3'-phosphate
  modified_base 16: mod_base = OTHER; note = 2'-fluoroguanosine-3'-phosphate
  modified_base 17: mod_base = OTHER; note = 2'-O-methyluridine-3'-phosphate
  modified_base 18: mod_base = OTHER; note = 2'-O-methylguanosine-3'-phosphate
  modified_base 19: mod_base = OTHER; note = 2'-O-methylguanosine-3'-phosphate
  modified_base 20: mod_base = OTHER; note = 2'-O-methyladenosine-3'-phosphate
  modified_base 21: mod_base = OTHER; note = 2'-O-methyladenosine-3'-phosphorothioate
  modified_base 22: mod_base = OTHER; note = 2'-O-methyladenosine-3'-phosphorothioate
  modified_base 23: mod_base = OTHER; note = 2'-O-methyladenosine-3'-phosphate
aaatcacaagcatctgtggaaaa

SEQ ID NO: 3558 - RNA, 23 nt, synthetic construct
  source 1..23: mol_type = other RNA
  modified_base 1: mod_base = OTHER; note = 2'-O-methyladenosine-3'-phosphorothioate
  modified_base 2: mod_base = OTHER; note = 2'-fluoroadenosine-3'-phosphorothioate
  modified_base 3: mod_base = OTHER; note = 2'-O-methyladenosine-3'-phosphate
  modified_base 4: mod_base = OTHER; note = 2'-O-methyladenosine-3'-phosphate
  modified_base 5: mod_base = OTHER; note = 2'-O-methyluridine-3'-phosphate
  modified_base 6: mod_base = OTHER; note = 2'-fluorocytidine-3'-phosphate
  modified_base 7: mod_base = OTHER; note = 2'-O-methyladenosine-3'-phosphate
  modified_base 8: mod_base = OTHER; note = 2'-fluorocytidine-3'-phosphate
  modified_base 9: mod_base = OTHER; note = 2'-fluoroadenosine-3'-phosphate
  modified_base 10: mod_base = OTHER; note = 2'-O-methyladenosine-3'-phosphate
  modified_base 11: mod_base = OTHER; note = 2'-O-methylguanosine-3'-phosphate
  modified_base 12: mod_base = OTHER; note = 2'-O-methylcytidine-3'-phosphate
  modified_base 13: mod_base = OTHER; note = 2'-O-methyladenosine-3'-phosphate
  modified_base 14: mod_base = OTHER; note = 2'-fluorouridine-3'-phosphate
  modified_base 15: mod_base = OTHER; note = 2'-O-methylcytidine-3'-phosphate
  modified_base 16: mod_base = OTHER; note = 2'-fluorouridine-3'-phosphate
  modified_base 17: mod_base = OTHER; note = 2'-O-methylguanosine-3'-phosphate
  modified_base 18: mod_base = OTHER; note = 2'-O-methyluridine-3'-phosphate
  modified_base 19: mod_base = OTHER; note = 2'-O-methylguanosine-3'-phosphate
  modified_base 20: mod_base = OTHER; note = 2'-O-methylguanosine-3'-phosphate
  modified_base 21: mod_base = OTHER; note = 2'-O-methyladenosine-3'-phosphorothioate
  modified_base 22: mod_base = OTHER; note = 2'-O-methyladenosine-3'-phosphorothioate
  modified_base 23: mod_base = OTHER; note = 2'-O-methyladenosine-3'-phosphate
aaaatcacaagcatctgtggaaa

SEQ ID NO: 3559 - RNA, 23 nt, synthetic construct
  source 1..23: mol_type = other RNA
  modified_base 1: mod_base = OTHER; note = 2'-O-methyladenosine-3'-phosphorothioate
  modified_base 2: mod_base = OTHER; note = 2'-fluoroadenosine-3'-phosphorothioate
  modified_base 3: mod_base = OTHER; note = 2'-O-methyladenosine-3'-phosphate
  modified_base 4: mod_base = OTHER; note = 2'-O-methyladenosine-3'-phosphate
  modified_base 5: mod_base = OTHER; note = 2'-O-methyladenosine-3'-phosphate
  modified_base 6: mod_base = OTHER; note = 2'-fluorouridine-3'-phosphate
  modified_base 7: mod_base = OTHER; note = 2'-O-methylcytidine-3'-phosphate
  modified_base 8: mod_base = OTHER; note = 2'-fluoroadenosine-3'-phosphate
  modified_base 9: mod_base = OTHER; note = 2'-fluorocytidine-3'-phosphate
  modified_base 10: mod_base = OTHER; note = 2'-O-methyladenosine-3'-phosphate
  modified_base 11: mod_base = OTHER; note = 2'-O-methyladenosine-3'-phosphate
  modified_base 12: mod_base = OTHER; note = 2'-O-methylguanosine-3'-phosphate
  modified_base 13: mod_base = OTHER; note = 2'-O-methylcytidine-3'-phosphate
  modified_base 14: mod_base = OTHER; note = 2'-fluoroadenosine-3'-phosphate
  modified_base 15: mod_base = OTHER; note = 2'-O-methyluridine-3'-phosphate
  modified_base 16: mod_base = OTHER; note = 2'-fluorocytidine-3'-phosphate
  modified_base 17: mod_base = OTHER; note = 2'-O-methyluridine-3'-phosphate
  modified_base 18: mod_base = OTHER; note = 2'-O-methylguanosine-3'-phosphate
  modified_base 19: mod_base = OTHER; note = 2'-O-methyluridine-3'-phosphate
  modified_base 20: mod_base = OTHER; note = 2'-O-methylguanosine-3'-phosphate
  modified_base 21: mod_base = OTHER; note = 2'-O-methylguanosine-3'-phosphorothioate
  modified_base 22: mod_base = OTHER; note = 2'-O-methyladenosine-3'-phosphorothioate
  modified_base 23: mod_base = OTHER; note = 2'-O-methyladenosine-3'-phosphate
aaaaatcacaagcatctgtggaa

SEQ ID NO: 3560 - DNA, 23 bp, synthetic construct
  source 1..23: mol_type = other DNA
  modified_base 1: mod_base = OTHER; note = 2'-O-methyladenosine-3'-phosphorothioate
  modified_base 2: mod_base = OTHER; note = 2'-deoxythimidine-3'-phosphorothioate
  modified_base 3: mod_base = OTHER; note = 2'-O-methyluridine-3'-phosphate
  modified_base 4: mod_base = OTHER; note = 2'-O-methylguanosine-3'-phosphate
  modified_base 6: mod_base = OTHER; note = 2'-O-methyluridine-3'-phosphate
  modified_base 8: mod_base = OTHER; note = 2'-O-methyladenosine-3'-phosphate
  modified_base 9: mod_base = OTHER; note = 2'-O-methyladenosine-3'-phosphate
  modified_base 10: mod_base = OTHER; note = 2'-O-methyluridine-3'-phosphate
  modified_base 11: mod_base = OTHER; note = 2'-O-methyluridine-3'-phosphate
  modified_base 13: mod_base = OTHER; note = 2'-O-methyluridine-3'-phosphate
  modified_base 14: mod_base = OTHER; note = 2'-fluorouridine-3'-phosphate
  modified_base 15: mod_base = OTHER; note = 2'-O-methylguanosine-3'-phosphate
  modified_base 16: mod_base = OTHER; note = 2'-O-methylcytidine-3'-phosphate
  modified_base 17: mod_base = OTHER; note = 2'-O-methyladenosine-3'-phosphate
  modified_base 18: mod_base = OTHER; note = 2'-O-methylguanosine-3'-phosphate
  modified_base 19: mod_base = OTHER; note = 2'-O-methylguanosine-3'-phosphate
  modified_base 20: mod_base = OTHER; note = 2'-O-methyluridine-3'-phosphate
  modified_base 21: mod_base = OTHER; note = 2'-O-methyluridine-3'-phosphorothioate
  modified_base 22: mod_base = OTHER; note = 2'-O-methylcytidine-3'-phosphorothioate
  modified_base 23: mod_base = OTHER; note = 2'-O-methyladenosine-3'-phosphate
  misc_feature 1: note = RNA
  misc_feature 2: note = DNA
  misc_feature 3..4: note = RNA
  misc_feature 5: note = DNA
  misc_feature 6: note = RNA
  misc_feature 7: note = DNA
  misc_feature 8..11: note = RNA
  misc_feature 12: note = DNA
  misc_feature 13..23: note = RNA
attgctcaatttttgcaggttca

SEQ ID NO: 3561 - DNA, 23 bp, synthetic construct
  source 1..23: mol_type = other DNA
  modified_base 1: mod_base = OTHER; note = 2'-O-methyladenosine-3'-phosphorothioate
  modified_base 2: mod_base = OTHER; note = 2'-deoxyadenosine-3'-phosphorothioate
  modified_base 3: mod_base = OTHER; note = 2'-O-methyluridine-3'-phosphate
  modified_base 4: mod_base = OTHER; note = 2'-O-methyluridine-3'-phosphate
  modified_base 6: mod_base = OTHER; note = 2'-O-methylcytidine-3'-phosphate
  modified_base 8: mod_base = OTHER; note = 2'-O-methylcytidine-3'-phosphate
  modified_base 9: mod_base = OTHER; note = 2'-O-methyladenosine-3'-phosphate
  modified_base 10: mod_base = OTHER; note = 2'-O-methyladenosine-3'-phosphate
  modified_base 11: mod_base = OTHER; note = 2'-O-methyluridine-3'-phosphate
  modified_base 13: mod_base = OTHER; note = 2'-O-methyluridine-3'-phosphate
  modified_base 14: mod_base = OTHER; note = 2'-fluorouridine-3'-phosphate
  modified_base 15: mod_base = OTHER; note = 2'-O-methyluridine-3'-phosphate
  modified_base 16: mod_base = OTHER; note = 2'-O-methylguanosine-3'-phosphate
  modified_base 17: mod_base = OTHER; note = 2'-O-methylcytidine-3'-phosphate
  modified_base 18: mod_base = OTHER; note = 2'-O-methyladenosine-3'-phosphate
  modified_base 19: mod_base = OTHER; note = 2'-O-methylguanosine-3'-phosphate
  modified_base 20: mod_base = OTHER; note = 2'-O-methylguanosine-3'-phosphate
  modified_base 21: mod_base = OTHER; note = 2'-O-methyluridine-3'-phosphorothioate
  modified_base 22: mod_base = OTHER; note = 2'-O-methyluridine-3'-phosphorothioate
  modified_base 23: mod_base = OTHER; note = 2'-O-methylcytidine-3'-phosphate
  misc_feature 1: note = RNA
  misc_feature 2: note = DNA
  misc_feature 3..4: note = RNA
  misc_feature 5: note = DNA
  misc_feature 6: note = RNA
  misc_feature 7: note = DNA
  misc_feature 8..11: note = RNA
  misc_feature 12: note = DNA
  misc_feature 13..23: note = RNA
aattgctcaatttttgcaggttc

SEQ ID NO: 3562 - DNA, 23 bp, synthetic construct
  source 1..23: mol_type = other DNA
  modified_base 1: mod_base = OTHER; note = 2'-O-methyladenosine-3'-phosphorothioate
  modified_base 2: mod_base = OTHER; note = 2'-deoxycytidine-3'-phosphorothioate
  modified_base 3: mod_base = OTHER; note = 2'-O-methyladenosine-3'-phosphate
  modified_base 4: mod_base = OTHER; note = 2'-O-methyluridine-3'-phosphate
  modified_base 6: mod_base = OTHER; note = 2'-O-methylguanosine-3'-phosphate
  modified_base 8: mod_base = OTHER; note = 2'-O-methyluridine-3'-phosphate
  modified_base 9: mod_base = OTHER; note = 2'-O-methylcytidine-3'-phosphate
  modified_base 10: mod_base = OTHER; note = 2'-O-methyladenosine-3'-phosphate
  modified_base 11: mod_base = OTHER; note = 2'-O-methyladenosine-3'-phosphate
  modified_base 13: mod_base = OTHER; note = 2'-O-methyluridine-3'-phosphate
  modified_base 14: mod_base = OTHER; note = 2'-fluorouridine-3'-phosphate
  modified_base 15: mod_base = OTHER; note = 2'-O-methyluridine-3'-phosphate
  modified_base 16: mod_base = OTHER; note = 2'-O-methyluridine-3'-phosphate
  modified_base 17: mod_base = OTHER; note = 2'-O-methylguanosine-3'-phosphate
  modified_base 18: mod_base = OTHER; note = 2'-O-methylcytidine-3'-phosphate
  modified_base 19: mod_base = OTHER; note = 2'-O-methyladenosine-3'-phosphate
  modified_base 20: mod_base = OTHER; note = 2'-O-methylguanosine-3'-phosphate
  modified_base 21: mod_base = OTHER; note = 2'-O-methylguanosine-3'-phosphorothioate
  modified_base 22: mod_base = OTHER; note = 2'-O-methyluridine-3'-phosphorothioate
  modified_base 23: mod_base = OTHER; note = 2'-O-methyluridine-3'-phosphate
  misc_feature 1: note = RNA
  misc_feature 2: note = DNA
  misc_feature 3..4: note = RNA
  misc_feature 5: note = DNA
  misc_feature 6: note = RNA
  misc_feature 7: note = DNA
  misc_feature 8..11: note = RNA
  misc_feature 12: note = DNA
  misc_feature 13..23: note = RNA
acattgctcaatttttgcaggtt

SEQ ID NO: 3563 - DNA, 23 bp, synthetic construct
  source 1..23: mol_type = other DNA
  modified_base 1: mod_base = OTHER; note = 2'-O-methyladenosine-3'-phosphorothioate
  modified_base 2: mod_base = OTHER; note = 2'-deoxythimidine-3'-phosphorothioate
  modified_base 3: mod_base = OTHER; note = 2'-O-methylcytidine-3'-phosphate
  modified_base 4: mod_base = OTHER; note = 2'-O-methyladenosine-3'-phosphate
  modified_base 6: mod_base = OTHER; note = 2'-O-methyluridine-3'-phosphate
  modified_base 8: mod_base = OTHER; note = 2'-O-methylcytidine-3'-phosphate
  modified_base 9: mod_base = OTHER; note = 2'-O-methyluridine-3'-phosphate
  modified_base 10: mod_base = OTHER; note = 2'-O-methylcytidine-3'-phosphate
  modified_base 11: mod_base = OTHER; note = 2'-O-methyladenosine-3'-phosphate
  modified_base 13: mod_base = OTHER; note = 2'-O-methyluridine-3'-phosphate
  modified_base 14: mod_base = OTHER; note = 2'-fluorouridine-3'-phosphate
  modified_base 15: mod_base = OTHER; note = 2'-O-methyluridine-3'-phosphate
  modified_base 16: mod_base = OTHER; note = 2'-O-methyluridine-3'-phosphate
  modified_base 17: mod_base = OTHER; note = 2'-O-methyluridine-3'-phosphate
  modified_base 18: mod_base = OTHER; note = 2'-O-methylguanosine-3'-phosphate
  modified_base 19: mod_base = OTHER; note = 2'-O-methylcytidine-3'-phosphate
  modified_base 20: mod_base = OTHER; note = 2'-O-methyladenosine-3'-phosphate
  modified_base 21: mod_base = OTHER; note = 2'-O-methylguanosine-3'-phosphorothioate
  modified_base 22: mod_base = OTHER; note = 2'-O-methylguanosine-3'-phosphorothioate
  modified_base 23: mod_base = OTHER; note = 2'-O-methyluridine-3'-phosphate
  misc_feature 1: note = RNA
  misc_feature 2: note = DNA
  misc_feature 3..4: note = RNA
  misc_feature 5: note = DNA
  misc_feature 6: note = RNA
  misc_feature 7: note = DNA
  misc_feature 8..11: note = RNA
  misc_feature 12: note = DNA
  misc_feature 13..23: note = RNA
atcattgctcaatttttgcaggt

SEQ ID NO: 3564 - DNA, 23 bp, synthetic construct
  source 1..23: mol_type = other DNA
  modified_base 1: mod_base = OTHER; note = 2'-O-methyladenosine-3'-phosphorothioate
  modified_base 2: mod_base = OTHER; note = 2'-deoxythimidine-3'-phosphorothioate
  modified_base 3: mod_base = OTHER; note = 2'-O-methyluridine-3'-phosphate
  modified_base 4: mod_base = OTHER; note = 2'-O-methyluridine-3'-phosphate
  modified_base 6: mod_base = OTHER; note = 2'-O-methyluridine-3'-phosphate
  modified_base 8: mod_base = OTHER; note = 2'-O-methyluridine-3'-phosphate
  modified_base 9: mod_base = OTHER; note = 2'-O-methyluridine-3'-phosphate
  modified_base 10: mod_base = OTHER; note = 2'-O-methyluridine-3'-phosphate
  modified_base 11: mod_base = OTHER; note = 2'-O-methylcytidine-3'-phosphate
  modified_base 13: mod_base = OTHER; note = 2'-O-methylcytidine-3'-phosphate
  modified_base 14: mod_base = OTHER; note = 2'-fluoroadenosine-3'-phosphate
  modified_base 15: mod_base = OTHER; note = 2'-O-methyladenosine-3'-phosphate
  modified_base 16: mod_base = OTHER; note = 2'-O-methyladenosine-3'-phosphate
  modified_base 17: mod_base = OTHER; note = 2'-O-methylcytidine-3'-phosphate
  modified_base 18: mod_base = OTHER; note = 2'-O-methyladenosine-3'-phosphate
  modified_base 19: mod_base = OTHER; note = 2'-O-methyladenosine-3'-phosphate
  modified_base 20: mod_base = OTHER; note = 2'-O-methylguanosine-3'-phosphate
  modified_base 21: mod_base = OTHER; note = 2'-O-methylcytidine-3'-phosphorothioate
  modified_base 22: mod_base = OTHER; note = 2'-O-methyluridine-3'-phosphorothioate
  modified_base 23: mod_base = OTHER; note = 2'-O-methylguanosine-3'-phosphate
  misc_feature 1: note = RNA
  misc_feature 2: note = DNA
  misc_feature 3..4: note = RNA
  misc_feature 5: note = DNA
  misc_feature 6: note = RNA
  misc_feature 7: note = DNA
  misc_feature 8..11: note = RNA
  misc_feature 12: note = DNA
  misc_feature 13..23: note = RNA
atttttgtttcacaaacaagctg

SEQ ID NO: 3565 - RNA, 23 nt, synthetic construct
  source 1..23: mol_type = other RNA
  modified_base 1: mod_base = OTHER; note = 2'-O-methyladenosine-3'-phosphorothioate
  modified_base 2: mod_base = OTHER; note = 2'-fluoroadenosine-3'-phosphorothioate
  modified_base 3: mod_base = OTHER; note = 2'-O-methylguanosine-3'-phosphate
  modified_base 4: mod_base = OTHER; note = 2'-O-methylguanosine-3'-phosphate
  modified_base 5: mod_base = OTHER; note = 2'-O-methylguanosine-3'-phosphate
  modified_base 6: mod_base = OTHER; note = 2'-fluoroguanosine-3'-phosphate
  modified_base 7: mod_base = OTHER; note = 2'-O-methyluridine-3'-phosphate
  modified_base 8: mod_base = OTHER; note = 2'-fluoroguanosine-3'-phosphate
  modified_base 9: mod_base = OTHER; note = 2'-fluorouridine-3'-phosphate
  modified_base 10: mod_base = OTHER; note = 2'-O-methyladenosine-3'-phosphate
  modified_base 11: mod_base = OTHER; note = 2'-O-methyluridine-3'-phosphate
  modified_base 12: mod_base = OTHER; note = 2'-O-methylguanosine-3'-phosphate
  modified_base 13: mod_base = OTHER; note = 2'-O-methyluridine-3'-phosphate
  modified_base 14: mod_base = OTHER; note = 2'-fluoroadenosine-3'-phosphate
  modified_base 15: mod_base = OTHER; note = 2'-O-methylcytidine-3'-phosphate
  modified_base 16: mod_base = OTHER; note = 2'-fluoroadenosine-3'-phosphate
  modified_base 17: mod_base = OTHER; note = 2'-O-methylcytidine-3'-phosphate
  modified_base 18: mod_base = OTHER; note = 2'-O-methylcytidine-3'-phosphate
  modified_base 19: mod_base = OTHER; note = 2'-O-methylcytidine-3'-phosphate
  modified_base 20: mod_base = OTHER; note = 2'-O-methylguanosine-3'-phosphate
  modified_base 21: mod_base = OTHER; note = 2'-O-methylguanosine-3'-phosphorothioate
  modified_base 22: mod_base = OTHER; note = 2'-O-methyluridine-3'-phosphorothioate
  modified_base 23: mod_base = OTHER; note = 2'-O-methylcytidine-3'-phosphate
aaggggtgtatgtacacccggtc

SEQ ID NO: 3566 - DNA, 23 bp, synthetic construct
  source 1..23: mol_type = other DNA
  modified_base 1: mod_base = OTHER; note = 2'-O-methyladenosine-3'-phosphorothioate
  modified_base 2: mod_base = OTHER; note = 2'-deoxyadenosine-3'-phosphorothioate
  modified_base 3: mod_base = OTHER; note = 2'-O-methylguanosine-3'-phosphate
  modified_base 4: mod_base = OTHER; note = 2'-O-methylguanosine-3'-phosphate
  modified_base 6: mod_base = OTHER; note = 2'-O-methylguanosine-3'-phosphate
  modified_base 8: mod_base = OTHER; note = 2'-O-methylguanosine-3'-phosphate
  modified_base 9: mod_base = OTHER; note = 2'-O-methyluridine-3'-phosphate
  modified_base 10: mod_base = OTHER; note = 2'-O-methyladenosine-3'-phosphate
  modified_base 11: mod_base = OTHER; note = 2'-O-methyluridine-3'-phosphate
  modified_base 13: mod_base = OTHER; note = 2'-O-methyluridine-3'-phosphate
  modified_base 14: mod_base = OTHER; note = 2'-fluoroadenosine-3'-phosphate
  modified_base 15: mod_base = OTHER; note = 2'-O-methylcytidine-3'-phosphate
  modified_base 16: mod_base = OTHER; note = 2'-O-methyladenosine-3'-phosphate
  modified_base 17: mod_base = OTHER; note = 2'-O-methylcytidine-3'-phosphate
  modified_base 18: mod_base = OTHER; note = 2'-O-methylcytidine-3'-phosphate
  modified_base 19: mod_base = OTHER; note = 2'-O-methylcytidine-3'-phosphate
  modified_base 20: mod_base = OTHER; note = 2'-O-methylguanosine-3'-phosphate
  modified_base 21: mod_base = OTHER; note = 2'-O-methylguanosine-3'-phosphorothioate
  modified_base 22: mod_base = OTHER; note = 2'-O-methyluridine-3'-phosphorothioate
  modified_base 23: mod_base = OTHER; note = 2'-O-methylcytidine-3'-phosphate
  misc_feature 1: note = RNA
  misc_feature 2: note = DNA
  misc_feature 3..4: note = RNA
  misc_feature 5: note = DNA
  misc_feature 6: note = RNA
  misc_feature 7: note = DNA
  misc_feature 8..11: note = RNA
  misc_feature 12: note = DNA
  misc_feature 13..23: note = RNA
aaggggtgtatgtacacccggtc

SEQ ID NO: 3567 - RNA, 23 nt, synthetic construct
  source 1..23: mol_type = other RNA
  modified_base 1: mod_base = OTHER; note = 2'-O-methyladenosine-3'-phosphorothioate
  modified_base 2: mod_base = OTHER; note = 2'-fluoroadenosine-3'-phosphorothioate
  modified_base 3: mod_base = OTHER; note = 2'-O-methyladenosine-3'-phosphate
  modified_base 4: mod_base = OTHER; note = 2'-O-methylguanosine-3'-phosphate
  modified_base 5: mod_base = OTHER; note = 2'-O-methylguanosine-3'-phosphate
  modified_base 6: mod_base = OTHER; note = 2'-fluoroguanosine-3'-phosphate
  modified_base 7: mod_base = OTHER; note = 2'-O-methylguanosine-3'-phosphate
  modified_base 8: mod_base = OTHER; note = 2'-fluorouridine-3'-phosphate
  modified_base 9: mod_base = OTHER; note = 2'-fluoroguanosine-3'-phosphate
  modified_base 10: mod_base = OTHER; note = 2'-O-methyluridine-3'-phosphate
  modified_base 11: mod_base = OTHER; note = 2'-O-methyladenosine-3'-phosphate
  modified_base 12: mod_base = OTHER; note = 2'-O-methyluridine-3'-phosphate
  modified_base 13: mod_base = OTHER; note = 2'-O-methylguanosine-3'-phosphate
  modified_base 14: mod_base = OTHER; note = 2'-fluorouridine-3'-phosphate
  modified_base 15: mod_base = OTHER; note = 2'-O-methyladenosine-3'-phosphate
  modified_base 16: mod_base = OTHER; note = 2'-fluorocytidine-3'-phosphate
  modified_base 17: mod_base = OTHER; note = 2'-O-methyladenosine-3'-phosphate
  modified_base 18: mod_base = OTHER; note = 2'-O-methylcytidine-3'-phosphate
  modified_base 19: mod_base = OTHER; note = 2'-O-methylcytidine-3'-phosphate
  modified_base 20: mod_base = OTHER; note = 2'-O-methylcytidine-3'-phosphate
  modified_base 21: mod_base = OTHER; note = 2'-O-methylguanosine-3'-phosphorothioate
  modified_base 22: mod_base = OTHER; note = 2'-O-methylguanosine-3'-phosphorothioate
  modified_base 23: mod_base = OTHER; note = 2'-O-methyluridine-3'-phosphate
aaaggggtgtatgtacacccggt

SEQ ID NO: 3568 - DNA, 23 bp, synthetic construct
  source 1..23: mol_type = other DNA
  modified_base 1: mod_base = OTHER; note = 2'-O-methyladenosine-3'-phosphorothioate
  modified_base 2: mod_base = OTHER; note = 2'-deoxyadenosine-3'-phosphorothioate
  modified_base 3: mod_base = OTHER; note = 2'-O-methyladenosine-3'-phosphate
  modified_base 4: mod_base = OTHER; note = 2'-O-methylguanosine-3'-phosphate
  modified_base 6: mod_base = OTHER; note = 2'-O-methylguanosine-3'-phosphate
  modified_base 8: mod_base = OTHER; note = 2'-O-methyluridine-3'-phosphate
  modified_base 9: mod_base = OTHER; note = 2'-O-methylguanosine-3'-phosphate
  modified_base 10: mod_base = OTHER; note = 2'-O-methyluridine-3'-phosphate
  modified_base 11: mod_base = OTHER; note = 2'-O-methyladenosine-3'-phosphate
  modified_base 13: mod_base = OTHER; note = 2'-O-methylguanosine-3'-phosphate
  modified_base 14: mod_base = OTHER; note = 2'-fluorouridine-3'-phosphate
  modified_base 15: mod_base = OTHER; note = 2'-O-methyladenosine-3'-phosphate
  modified_base 16: mod_base = OTHER; note = 2'-O-methylcytidine-3'-phosphate
  modified_base 17: mod_base = OTHER; note = 2'-O-methyladenosine-3'-phosphate
  modified_base 18: mod_base = OTHER; note = 2'-O-methylcytidine-3'-phosphate
  modified_base 19: mod_base = OTHER; note = 2'-O-methylcytidine-3'-phosphate
  modified_base 20: mod_base = OTHER; note = 2'-O-methylcytidine-3'-phosphate
  modified_base 21: mod_base = OTHER; note = 2'-O-methylguanosine-3'-phosphorothioate
  modified_base 22: mod_base = OTHER; note = 2'-O-methylguanosine-3'-phosphorothioate
  modified_base 23: mod_base = OTHER; note = 2'-O-methyluridine-3'-phosphate
  misc_feature 1: note = RNA
  misc_feature 2: note = DNA
  misc_feature 3..4: note = RNA
  misc_feature 5: note = DNA
  misc_feature 6: note = RNA
  misc_feature 7: note = DNA
  misc_feature 8..11: note = RNA
  misc_feature 12: note = DNA
  misc_feature 13..23: note = RNA
aaaggggtgtatgtacacccggt

SEQ ID NO: 3569 - RNA, 23 nt, synthetic construct
  source 1..23: mol_type = other RNA
  modified_base 1: mod_base = OTHER; note = 2'-O-methyladenosine-3'-phosphorothioate
  modified_base 2: mod_base = OTHER; note = 2'-fluoroguanosine-3'-phosphorothioate
  modified_base 3: mod_base = OTHER; note = 2'-O-methyladenosine-3'-phosphate
  modified_base 4: mod_base = OTHER; note = 2'-O-methyladenosine-3'-phosphate
  modified_base 5: mod_base = OTHER; note = 2'-O-methylguanosine-3'-phosphate
  modified_base 6: mod_base = OTHER; note = 2'-fluoroguanosine-3'-phosphate
  modified_base 7: mod_base = OTHER; note = 2'-O-methylguanosine-3'-phosphate
  modified_base 8: mod_base = OTHER; note = 2'-fluoroguanosine-3'-phosphate
  modified_base 9: mod_base = OTHER; note = 2'-fluorouridine-3'-phosphate
  modified_base 10: mod_base = OTHER; note = 2'-O-methylguanosine-3'-phosphate
  modified_base 11: mod_base = OTHER; note = 2'-O-methyluridine-3'-phosphate
  modified_base 12: mod_base = OTHER; note = 2'-O-methyladenosine-3'-phosphate
  modified_base 13: mod_base = OTHER; note = 2'-O-methyluridine-3'-phosphate
  modified_base 14: mod_base = OTHER; note = 2'-fluoroguanosine-3'-phosphate
  modified_base 15: mod_base = OTHER; note = 2'-O-methyluridine-3'-phosphate
  modified_base 16: mod_base = OTHER; note = 2'-fluoroadenosine-3'-phosphate
  modified_base 17: mod_base = OTHER; note = 2'-O-methylcytidine-3'-phosphate
  modified_base 18: mod_base = OTHER; note = 2'-O-methyladenosine-3'-phosphate
  modified_base 19: mod_base = OTHER; note = 2'-O-methylcytidine-3'-phosphate
  modified_base 20: mod_base = OTHER; note = 2'-O-methylcytidine-3'-phosphate
  modified_base 21: mod_base = OTHER; note = 2'-O-methylcytidine-3'-phosphorothioate
  modified_base 22: mod_base = OTHER; note = 2'-O-methylguanosine-3'-phosphorothioate
  modified_base 23: mod_base = OTHER; note = 2'-O-methylguanosine-3'-phosphate
agaaggggtgtatgtacacccgg

SEQ ID NO: 3570 - DNA, 23 bp, synthetic construct
  source 1..23: mol_type = other DNA
  modified_base 1: mod_base = OTHER; note = 2'-O-methyladenosine-3'-phosphorothioate
  modified_base 2: mod_base = OTHER; note = 2'-deoxyguanosine-3'-phosphorothioate
  modified_base 3: mod_base = OTHER; note = 2'-O-methyladenosine-3'-phosphate
  modified_base 4: mod_base = OTHER; note = 2'-O-methyladenosine-3'-phosphate
  modified_base 6: mod_base = OTHER; note = 2'-O-methylguanosine-3'-phosphate
  modified_base 8: mod_base = OTHER; note = 2'-O-methylguanosine-3'-phosphate
  modified_base 9: mod_base = OTHER; note = 2'-O-methyluridine-3'-phosphate
  modified_base 10: mod_base = OTHER; note = 2'-O-methylguanosine-3'-phosphate
  modified_base 11: mod_base = OTHER; note = 2'-O-methyluridine-3'-phosphate
  modified_base 13: mod_base = OTHER; note = 2'-O-methyluridine-3'-phosphate
  modified_base 14: mod_base = OTHER; note = 2'-fluoroguanosine-3'-phosphate
  modified_base 15: mod_base = OTHER; note = 2'-O-methyluridine-3'-phosphate
  modified_base 16: mod_base = OTHER; note = 2'-O-methyladenosine-3'-phosphate
  modified_base 17: mod_base = OTHER; note = 2'-O-methylcytidine-3'-phosphate
  modified_base 18: mod_base = OTHER; note = 2'-O-methyladenosine-3'-phosphate
  modified_base 19: mod_base = OTHER; note = 2'-O-methylcytidine-3'-phosphate
  modified_base 20: mod_base = OTHER; note = 2'-O-methylcytidine-3'-phosphate
  modified_base 21: mod_base = OTHER; note = 2'-O-methylcytidine-3'-phosphorothioate
  modified_base 22: mod_base = OTHER; note = 2'-O-methylguanosine-3'-phosphorothioate
  modified_base 23: mod_base = OTHER; note = 2'-O-methylguanosine-3'-phosphate
  misc_feature 1: note = RNA
  misc_feature 2: note = DNA
  misc_feature 3..4: note = RNA
  misc_feature 5: note = DNA
  misc_feature 6: note = RNA
  misc_feature 7: note = DNA
  misc_feature 8..11: note = RNA
  misc_feature 12: note = DNA
  misc_feature 13..23: note = RNA
agaaggggtgtatgtacacccgg

SEQ ID NO: 3571 - RNA, 23 nt, synthetic construct
  source 1..23: mol_type = other RNA
  modified_base 1: mod_base = OTHER; note = 2'-O-methyladenosine-3'-phosphorothioate
  modified_base 2: mod_base = OTHER; note = 2'-fluoroguanosine-3'-phosphorothioate
  modified_base 3: mod_base = OTHER; note = 2'-O-methylguanosine-3'-phosphate
  modified_base 4: mod_base = OTHER; note = 2'-O-methyladenosine-3'-phosphate
  modified_base 5: mod_base = OTHER; note = 2'-O-methyladenosine-3'-phosphate
  modified_base 6: mod_base = OTHER; note = 2'-fluoroguanosine-3'-phosphate
  modified_base 7: mod_base = OTHER; note = 2'-O-methylguanosine-3'-phosphate
  modified_base 8: mod_base = OTHER; note = 2'-fluoroguanosine-3'-phosphate
  modified_base 9: mod_base = OTHER; note = 2'-fluoroguanosine-3'-phosphate
  modified_base 10: mod_base = OTHER; note = 2'-O-methyluridine-3'-phosphate
  modified_base 11: mod_base = OTHER; note = 2'-O-methylguanosine-3'-phosphate
  modified_base 12: mod_base = OTHER; note = 2'-O-methyluridine-3'-phosphate
  modified_base 13: mod_base = OTHER; note = 2'-O-methyladenosine-3'-phosphate
  modified_base 14: mod_base = OTHER; note = 2'-fluorouridine-3'-phosphate
  modified_base 15: mod_base = OTHER; note = 2'-O-methylguanosine-3'-phosphate
  modified_base 16: mod_base = OTHER; note = 2'-fluorouridine-3'-phosphate
  modified_base 17: mod_base = OTHER; note = 2'-O-methyladenosine-3'-phosphate
  modified_base 18: mod_base = OTHER; note = 2'-O-methylcytidine-3'-phosphate
  modified_base 19: mod_base = OTHER; note = 2'-O-methyladenosine-3'-phosphate
  modified_base 20: mod_base = OTHER; note = 2'-O-methylcytidine-3'-phosphate
  modified_base 21: mod_base = OTHER; note = 2'-O-methylcytidine-3'-phosphorothioate
  modified_base 22: mod_base = OTHER; note = 2'-O-methylcytidine-3'-phosphorothioate
  modified_base 23: mod_base = OTHER; note = 2'-O-methylguanosine-3'-phosphate
aggaaggggtgtatgtacacccg

SEQ ID NO: 3572 - DNA, 23 bp, synthetic construct
  source 1..23: mol_type = other DNA
  modified_base 1: mod_base = OTHER; note = 2'-O-methyladenosine-3'-phosphorothioate
  modified_base 2: mod_base = OTHER; note = 2'-deoxyguanosine-3'-phosphorothioate
  modified_base 3: mod_base = OTHER; note = 2'-O-methylguanosine-3'-phosphate
  modified_base 4: mod_base = OTHER; note = 2'-O-methyladenosine-3'-phosphate
  modified_base 6: mod_base = OTHER; note = 2'-O-methylguanosine-3'-phosphate
  modified_base 8: mod_base = OTHER; note = 2'-O-methylguanosine-3'-phosphate
  modified_base 9: mod_base = OTHER; note = 2'-O-methylguanosine-3'-phosphate
  modified_base 10: mod_base = OTHER; note = 2'-O-methyluridine-3'-phosphate
  modified_base 11: mod_base = OTHER; note = 2'-O-methylguanosine-3'-phosphate
  modified_base 13: mod_base = OTHER; note = 2'-O-methyladenosine-3'-phosphate
  modified_base 14: mod_base = OTHER; note = 2'-fluorouridine-3'-phosphate
  modified_base 15: mod_base = OTHER; note = 2'-O-methylguanosine-3'-phosphate
  modified_base 16: mod_base = OTHER; note = 2'-O-methyluridine-3'-phosphate
  modified_base 17: mod_base = OTHER; note = 2'-O-methyladenosine-3'-phosphate
  modified_base 18: mod_base = OTHER; note = 2'-O-methylcytidine-3'-phosphate
  modified_base 19: mod_base = OTHER; note = 2'-O-methyladenosine-3'-phosphate
  modified_base 20: mod_base = OTHER; note = 2'-O-methylcytidine-3'-phosphate
  modified_base 21: mod_base = OTHER; note = 2'-O-methylcytidine-3'-phosphorothioate
  modified_base 22: mod_base = OTHER; note = 2'-O-methylcytidine-3'-phosphorothioate
  modified_base 23: mod_base = OTHER; note = 2'-O-methylguanosine-3'-phosphate
  misc_feature 1: note = RNA
  misc_feature 2: note = DNA
  misc_feature 3..4: note = RNA
  misc_feature 5: note = DNA
  misc_feature 6: note = RNA
  misc_feature 7: note = DNA
  misc_feature 8..11: note = RNA
  misc_feature 12: note = DNA
  misc_feature 13..23: note = RNA
aggaaggggtgtatgtacacccg

SEQ ID NO: 3573 - RNA, 23 nt, synthetic construct
  source 1..23: mol_type = other RNA
  modified_base 1: mod_base = OTHER; note = 2'-O-methyladenosine-3'-phosphorothioate
  modified_base 2: mod_base = OTHER; note = 2'-fluorouridine -3'-phosphorothioate
  modified_base 3: mod_base = OTHER; note = 2'-O-methylguanosine-3'-phosphate
  modified_base 4: mod_base = OTHER; note = 2'-O-methylguanosine-3'-phosphate
  modified_base 5: mod_base = OTHER; note = 2'-O-methyladenosine-3'-phosphate
  modified_base 6: mod_base = OTHER; note = 2'-fluoroadenosine-3'-phosphate
  modified_base 7: mod_base = OTHER; note = 2'-O-methylguanosine-3'-phosphate
  modified_base 8: mod_base = OTHER; note = 2'-fluoroguanosine-3'-phosphate
  modified_base 9: mod_base = OTHER; note = 2'-fluoroguanosine-3'-phosphate
  modified_base 10: mod_base = OTHER; note = 2'-O-methylguanosine-3'-phosphate
  modified_base 11: mod_base = OTHER; note = 2'-O-methyluridine-3'-phosphate
  modified_base 12: mod_base = OTHER; note = 2'-O-methylguanosine-3'-phosphate
  modified_base 13: mod_base = OTHER; note = 2'-O-methyluridine-3'-phosphate
  modified_base 14: mod_base = OTHER; note = 2'-fluoroadenosine-3'-phosphate
  modified_base 15: mod_base = OTHER; note = 2'-O-methyluridine-3'-phosphate
  modified_base 16: mod_base = OTHER; note = 2'-fluoroguanosine-3'-phosphate
  modified_base 17: mod_base = OTHER; note = 2'-O-methyluridine-3'-phosphate
  modified_base 18: mod_base = OTHER; note = 2'-O-methyladenosine-3'-phosphate
  modified_base 19: mod_base = OTHER; note = 2'-O-methylcytidine-3'-phosphate
  modified_base 20: mod_base = OTHER; note = 2'-O-methyladenosine-3'-phosphate
  modified_base 21: mod_base = OTHER; note = 2'-O-methylcytidine-3'-phosphorothioate
  modified_base 22: mod_base = OTHER; note = 2'-O-methylcytidine-3'-phosphorothioate
  modified_base 23: mod_base = OTHER; note = 2'-O-methylcytidine-3'-phosphate
atggaaggggtgtatgtacaccc

SEQ ID NO: 3574 - DNA, 23 bp, synthetic construct
  source 1..23: mol_type = other DNA
  modified_base 1: mod_base = OTHER; note = 2'-O-methyladenosine-3'-phosphorothioate
  modified_base 2: mod_base = OTHER; note = 2'-deoxythimidine-3'-phosphorothioate
  modified_base 3: mod_base = OTHER; note = 2'-O-methylguanosine-3'-phosphate
  modified_base 4: mod_base = OTHER; note = 2'-O-methylguanosine-3'-phosphate
  modified_base 6: mod_base = OTHER; note = 2'-O-methyladenosine-3'-phosphate
  modified_base 8: mod_base = OTHER; note = 2'-O-methylguanosine-3'-phosphate
  modified_base 9: mod_base = OTHER; note = 2'-O-methylguanosine-3'-phosphate
  modified_base 10: mod_base = OTHER; note = 2'-O-methylguanosine-3'-phosphate
  modified_base 11: mod_base = OTHER; note = 2'-O-methyluridine-3'-phosphate
  modified_base 13: mod_base = OTHER; note = 2'-O-methyluridine-3'-phosphate
  modified_base 14: mod_base = OTHER; note = 2'-fluoroadenosine-3'-phosphate
  modified_base 15: mod_base = OTHER; note = 2'-O-methyluridine-3'-phosphate
  modified_base 16: mod_base = OTHER; note = 2'-O-methylguanosine-3'-phosphate
  modified_base 17: mod_base = OTHER; note = 2'-O-methyluridine-3'-phosphate
  modified_base 18: mod_base = OTHER; note = 2'-O-methyladenosine-3'-phosphate
  modified_base 19: mod_base = OTHER; note = 2'-O-methylcytidine-3'-phosphate
  modified_base 20: mod_base = OTHER; note = 2'-O-methyladenosine-3'-phosphate
  modified_base 21: mod_base = OTHER; note = 2'-O-methylcytidine-3'-phosphorothioate
  modified_base 22: mod_base = OTHER; note = 2'-O-methylcytidine-3'-phosphorothioate
  modified_base 23: mod_base = OTHER; note = 2'-O-methylcytidine-3'-phosphate
  misc_feature 1: note = RNA
  misc_feature 2: note = DNA
  misc_feature 3..4: note = RNA
  misc_feature 5: note = DNA
  misc_feature 6: note = RNA
  misc_feature 7: note = DNA
  misc_feature 8..11: note = RNA
  misc_feature 12: note = DNA
  misc_feature 13..23: note = RNA
atggaaggggtgtatgtacaccc

SEQ ID NO: 3575 - RNA, 23 nt, synthetic construct
  source 1..23: mol_type = other RNA
  modified_base 1: mod_base = OTHER; note = 2'-O-methyladenosine-3'-phosphorothioate
  modified_base 2: mod_base = OTHER; note = 2'-fluoroguanosine-3'-phosphorothioate
  modified_base 3: mod_base = OTHER; note = 2'-O-methyluridine-3'-phosphate
  modified_base 4: mod_base = OTHER; note = 2'-O-methylguanosine-3'-phosphate
  modified_base 5: mod_base = OTHER; note = 2'-O-methylguanosine-3'-phosphate
  modified_base 6: mod_base = OTHER; note = 2'-fluoroadenosine-3'-phosphate
  modified_base 7: mod_base = OTHER; note = 2'-O-methyladenosine-3'-phosphate
  modified_base 8: mod_base = OTHER; note = 2'-fluoroguanosine-3'-phosphate
  modified_base 9: mod_base = OTHER; note = 2'-fluoroguanosine-3'-phosphate
  modified_base 10: mod_base = OTHER; note = 2'-O-methylguanosine-3'-phosphate
  modified_base 11: mod_base = OTHER; note = 2'-O-methylguanosine-3'-phosphate
  modified_base 12: mod_base = OTHER; note = 2'-O-methyluridine-3'-phosphate
  modified_base 13: mod_base = OTHER; note = 2'-O-methylguanosine-3'-phosphate
  modified_base 14: mod_base = OTHER; note = 2'-fluorouridine-3'-phosphate
  modified_base 15: mod_base = OTHER; note = 2'-O-methyladenosine-3'-phosphate
  modified_base 16: mod_base = OTHER; note = 2'-fluorouridine-3'-phosphate
  modified_base 17: mod_base = OTHER; note = 2'-O-methylguanosine-3'-phosphate
  modified_base 18: mod_base = OTHER; note = 2'-O-methyluridine-3'-phosphate
  modified_base 19: mod_base = OTHER; note = 2'-O-methyladenosine-3'-phosphate
  modified_base 20: mod_base = OTHER; note = 2'-O-methylcytidine-3'-phosphate
  modified_base 21: mod_base = OTHER; note = 2'-O-methyladenosine-3'-phosphorothioate
  modified_base 22: mod_base = OTHER; note = 2'-O-methylcytidine-3'-phosphorothioate
  modified_base 23: mod_base = OTHER; note = 2'-O-methylcytidine-3'-phosphate
agtggaaggggtgtatgtacacc

SEQ ID NO: 3576 - DNA, 23 bp, synthetic construct
  source 1..23: mol_type = other DNA
  modified_base 1: mod_base = OTHER; note = 2'-O-methyladenosine-3'-phosphorothioate
  modified_base 2: mod_base = OTHER; note = 2'-deoxyguanosine-3'-phosphorothioate
  modified_base 3: mod_base = OTHER; note = 2'-O-methyluridine-3'-phosphate
  modified_base 4: mod_base = OTHER; note = 2'-O-methylguanosine-3'-phosphate
  modified_base 6: mod_base = OTHER; note = 2'-O-methyladenosine-3'-phosphate
  modified_base 8: mod_base = OTHER; note = 2'-O-methylguanosine-3'-phosphate
  modified_base 9: mod_base = OTHER; note = 2'-O-methylguanosine-3'-phosphate
  modified_base 10: mod_base = OTHER; note = 2'-O-methylguanosine-3'-phosphate
  modified_base 11: mod_base = OTHER; note = 2'-O-methylguanosine-3'-phosphate
  modified_base 13: mod_base = OTHER; note = 2'-O-methylguanosine-3'-phosphate
  modified_base 14: mod_base = OTHER; note = 2'-fluorouridine-3'-phosphate
  modified_base 15: mod_base = OTHER; note = 2'-O-methyladenosine-3'-phosphate
  modified_base 16: mod_base = OTHER; note = 2'-O-methyluridine-3'-phosphate
  modified_base 17: mod_base = OTHER; note = 2'-O-methylguanosine-3'-phosphate
  modified_base 18: mod_base = OTHER; note = 2'-O-methyluridine-3'-phosphate
  modified_base 19: mod_base = OTHER; note = 2'-O-methyladenosine-3'-phosphate
  modified_base 20: mod_base = OTHER; note = 2'-O-methylcytidine-3'-phosphate
  modified_base 21: mod_base = OTHER; note = 2'-O-methyladenosine-3'-phosphorothioate
  modified_base 22: mod_base = OTHER; note = 2'-O-methylcytidine-3'-phosphorothioate
  modified_base 23: mod_base = OTHER; note = 2'-O-methylcytidine-3'-phosphate
  misc_feature 1: note = RNA
  misc_feature 2: note = DNA
  misc_feature 3..4: note = RNA
  misc_feature 5: note = DNA
  misc_feature 6: note = RNA
  misc_feature 7: note = DNA
  misc_feature 8..11: note = RNA
  misc_feature 12: note = DNA
  misc_feature 13..23: note = RNA
agtggaaggggtgtatgtacacc

SEQ ID NO: 3577 - RNA, 23 nt, synthetic construct
  source 1..23: mol_type = other RNA
  modified_base 1: mod_base = OTHER; note = 2'-O-methyladenosine-3'-phosphorothioate
  modified_base 2: mod_base = OTHER; note = 2'-fluoroguanosine-3'-phosphorothioate
  modified_base 3: mod_base = OTHER; note = 2'-O-methylguanosine-3'-phosphate
  modified_base 4: mod_base = OTHER; note = 2'-O-methyluridine-3'-phosphate
  modified_base 5: mod_base = OTHER; note = 2'-O-methylguanosine-3'-phosphate
  modified_base 6: mod_base = OTHER; note = 2'-fluoroguanosine-3'-phosphate
  modified_base 7: mod_base = OTHER; note = 2'-O-methyladenosine-3'-phosphate
  modified_base 8: mod_base = OTHER; note = 2'-fluoroadenosine-3'-phosphate
  modified_base 9: mod_base = OTHER; note = 2'-fluoroguanosine-3'-phosphate
  modified_base 10: mod_base = OTHER; note = 2'-O-methylguanosine-3'-phosphate
  modified_base 11: mod_base = OTHER; note = 2'-O-methylguanosine-3'-phosphate
  modified_base 12: mod_base = OTHER; note = 2'-O-methylguanosine-3'-phosphate
  modified_base 13: mod_base = OTHER; note = 2'-O-methyluridine-3'-phosphate
  modified_base 14: mod_base = OTHER; note = 2'-fluoroguanosine-3'-phosphate
  modified_base 15: mod_base = OTHER; note = 2'-O-methyluridine-3'-phosphate
  modified_base 16: mod_base = OTHER; note = 2'-fluoroadenosine-3'-phosphate
  modified_base 17: mod_base = OTHER; note = 2'-O-methyluridine-3'-phosphate
  modified_base 18: mod_base = OTHER; note = 2'-O-methylguanosine-3'-phosphate
  modified_base 19: mod_base = OTHER; note = 2'-O-methyluridine-3'-phosphate
  modified_base 20: mod_base = OTHER; note = 2'-O-methyladenosine-3'-phosphate
  modified_base 21: mod_base = OTHER; note = 2'-O-methylcytidine-3'-phosphorothioate
  modified_base 22: mod_base = OTHER; note = 2'-O-methyladenosine-3'-phosphorothioate
  modified_base 23: mod_base = OTHER; note = 2'-O-methylcytidine-3'-phosphate
aggtggaaggggtgtatgtacac

SEQ ID NO: 3578 - DNA, 23 bp, synthetic construct
  source 1..23: mol_type = other DNA
  modified_base 1: mod_base = OTHER; note = 2'-O-methyladenosine-3'-phosphorothioate
  modified_base 2: mod_base = OTHER; note = 2'-deoxyguanosine-3'-phosphorothioate
  modified_base 3: mod_base = OTHER; note = 2'-O-methylguanosine-3'-phosphate
  modified_base 4: mod_base = OTHER; note = 2'-O-methyluridine-3'-phosphate
  modified_base 6: mod_base = OTHER; note = 2'-O-methylguanosine-3'-phosphate
  modified_base 8: mod_base = OTHER; note = 2'-O-methyladenosine-3'-phosphate
  modified_base 9: mod_base = OTHER; note = 2'-O-methylguanosine-3'-phosphate
  modified_base 10: mod_base = OTHER; note = 2'-O-methylguanosine-3'-phosphate
  modified_base 11: mod_base = OTHER; note = 2'-O-methylguanosine-3'-phosphate
  modified_base 13: mod_base = OTHER; note = 2'-O-methyluridine-3'-phosphate
  modified_base 14: mod_base = OTHER; note = 2'-fluoroguanosine-3'-phosphate
  modified_base 15: mod_base = OTHER; note = 2'-O-methyluridine-3'-phosphate
  modified_base 16: mod_base = OTHER; note = 2'-O-methyladenosine-3'-phosphate
  modified_base 17: mod_base = OTHER; note = 2'-O-methyluridine-3'-phosphate
  modified_base 18: mod_base = OTHER; note = 2'-O-methylguanosine-3'-phosphate
  modified_base 19: mod_base = OTHER; note = 2'-O-methyluridine-3'-phosphate
  modified_base 20: mod_base = OTHER; note = 2'-O-methyladenosine-3'-phosphate
  modified_base 21: mod_base = OTHER; note = 2'-O-methylcytidine-3'-phosphorothioate
  modified_base 22: mod_base = OTHER; note = 2'-O-methyladenosine-3'-phosphorothioate
  modified_base 23: mod_base = OTHER; note = 2'-O-methylcytidine-3'-phosphate
  misc_feature 1: note = RNA
  misc_feature 2: note = DNA
  misc_feature 3..4: note = RNA
  misc_feature 5: note = DNA
  misc_feature 6: note = RNA
  misc_feature 7: note = DNA
  misc_feature 8..11: note = RNA
  misc_feature 12: note = DNA
  misc_feature 13..23: note = RNA
aggtggaaggggtgtatgtacac

SEQ ID NO: 3579 - RNA, 23 nt, synthetic construct
  source 1..23: mol_type = other RNA
  modified_base 1: mod_base = OTHER; note = 2'-O-methyladenosine-3'-phosphorothioate
  modified_base 2: mod_base = OTHER; note = 2'-fluoroadenosine-3'-phosphorothioate
  modified_base 3: mod_base = OTHER; note = 2'-O-methylguanosine-3'-phosphate
  modified_base 4: mod_base = OTHER; note = 2'-O-methylguanosine-3'-phosphate
  modified_base 5: mod_base = OTHER; note = 2'-O-methyluridine-3'-phosphate
  modified_base 6: mod_base = OTHER; note = 2'-fluoroguanosine-3'-phosphate
  modified_base 7: mod_base = OTHER; note = 2'-O-methylguanosine-3'-phosphate
  modified_base 8: mod_base = OTHER; note = 2'-fluoroadenosine-3'-phosphate
  modified_base 9: mod_base = OTHER; note = 2'-fluoroadenosine-3'-phosphate
  modified_base 10: mod_base = OTHER; note = 2'-O-methylguanosine-3'-phosphate
  modified_base 11: mod_base = OTHER; note = 2'-O-methylguanosine-3'-phosphate
  modified_base 12: mod_base = OTHER; note = 2'-O-methylguanosine-3'-phosphate
  modified_base 13: mod_base = OTHER; note = 2'-O-methylguanosine-3'-phosphate
  modified_base 14: mod_base = OTHER; note = 2'-fluorouridine-3'-phosphate
  modified_base 15: mod_base = OTHER; note = 2'-O-methylguanosine-3'-phosphate
  modified_base 16: mod_base = OTHER; note = 2'-fluorouridine-3'-phosphate
  modified_base 17: mod_base = OTHER; note = 2'-O-methyladenosine-3'-phosphate
  modified_base 18: mod_base = OTHER; note = 2'-O-methyluridine-3'-phosphate
  modified_base 19: mod_base = OTHER; note = 2'-O-methylguanosine-3'-phosphate
  modified_base 20: mod_base = OTHER; note = 2'-O-methyluridine-3'-phosphate
  modified_base 21: mod_base = OTHER; note = 2'-O-methyladenosine-3'-phosphorothioate
  modified_base 22: mod_base = OTHER; note = 2'-O-methylcytidine-3'-phosphorothioate
  modified_base 23: mod_base = OTHER; note = 2'-O-methyladenosine-3'-phosphate
aaggtggaaggggtgtatgtaca

SEQ ID NO: 3580 - DNA, 23 bp, synthetic construct
  source 1..23: mol_type = other DNA
  modified_base 1: mod_base = OTHER; note = 2'-O-methyladenosine-3'-phosphorothioate
  modified_base 2: mod_base = OTHER; note = 2'-deoxyadenosine-3'-phosphorothioate
  modified_base 3: mod_base = OTHER; note = 2'-O-methylguanosine-3'-phosphate
  modified_base 4: mod_base = OTHER; note = 2'-O-methylguanosine-3'-phosphate
  modified_base 6: mod_base = OTHER; note = 2'-O-methylguanosine-3'-phosphate
  modified_base 8: mod_base = OTHER; note = 2'-O-methyladenosine-3'-phosphate
  modified_base 9: mod_base = OTHER; note = 2'-O-methyladenosine-3'-phosphate
  modified_base 10: mod_base = OTHER; note = 2'-O-methylguanosine-3'-phosphate
  modified_base 11: mod_base = OTHER; note = 2'-O-methylguanosine-3'-phosphate
  modified_base 13: mod_base = OTHER; note = 2'-O-methylguanosine-3'-phosphate
  modified_base 14: mod_base = OTHER; note = 2'-fluorouridine-3'-phosphate
  modified_base 15: mod_base = OTHER; note = 2'-O-methylguanosine-3'-phosphate
  modified_base 16: mod_base = OTHER; note = 2'-O-methyluridine-3'-phosphate
  modified_base 17: mod_base = OTHER; note = 2'-O-methyladenosine-3'-phosphate
  modified_base 18: mod_base = OTHER; note = 2'-O-methyluridine-3'-phosphate
  modified_base 19: mod_base = OTHER; note = 2'-O-methylguanosine-3'-phosphate
  modified_base 20: mod_base = OTHER; note = 2'-O-methyluridine-3'-phosphate
  modified_base 21: mod_base = OTHER; note = 2'-O-methyladenosine-3'-phosphorothioate
  modified_base 22: mod_base = OTHER; note = 2'-O-methylcytidine-3'-phosphorothioate
  modified_base 23: mod_base = OTHER; note = 2'-O-methyladenosine-3'-phosphate
  misc_feature 1: note = RNA
  misc_feature 2: note = DNA
  misc_feature 3..4: note = RNA
  misc_feature 5: note = DNA
  misc_feature 6: note = RNA
  misc_feature 7: note = DNA
  misc_feature 8..11: note = RNA
  misc_feature 12: note = DNA
  misc_feature 13..23: note = RNA
aaggtggaaggggtgtatgtaca

SEQ ID NO: 3581 - RNA, 23 nt, synthetic construct
  source 1..23: mol_type = other RNA
  modified_base 1: mod_base = OTHER; note = 2'-O-methyladenosine-3'-phosphorothioate
  modified_base 2: mod_base = OTHER; note = 2'-fluoroguanosine-3'-phosphorothioate
  modified_base 3: mod_base = OTHER; note = 2'-O-methyladenosine-3'-phosphate
  modified_base 4: mod_base = OTHER; note = 2'-O-methylguanosine-3'-phosphate
  modified_base 5: mod_base = OTHER; note = 2'-O-methylguanosine-3'-phosphate
  modified_base 6: mod_base = OTHER; note = 2'-fluorouridine-3'-phosphate
  modified_base 7: mod_base = OTHER; note = 2'-O-methylguanosine-3'-phosphate
  modified_base 8: mod_base = OTHER; note = 2'-fluoroguanosine-3'-phosphate
  modified_base 9: mod_base = OTHER; note = 2'-fluoroadenosine-3'-phosphate
  modified_base 10: mod_base = OTHER; note = 2'-O-methyladenosine-3'-phosphate
  modified_base 11: mod_base = OTHER; note = 2'-O-methylguanosine-3'-phosphate
  modified_base 12: mod_base = OTHER; note = 2'-O-methylguanosine-3'-phosphate
  modified_base 13: mod_base = OTHER; note = 2'-O-methylguanosine-3'-phosphate
  modified_base 14: mod_base = OTHER; note = 2'-fluoroguanosine-3'-phosphate
  modified_base 15: mod_base = OTHER; note = 2'-O-methyluridine-3'-phosphate
  modified_base 16: mod_base = OTHER; note = 2'-fluoroguanosine-3'-phosphate
  modified_base 17: mod_base = OTHER; note = 2'-O-methyluridine-3'-phosphate
  modified_base 18: mod_base = OTHER; note = 2'-O-methyladenosine-3'-phosphate
  modified_base 19: mod_base = OTHER; note = 2'-O-methyluridine-3'-phosphate
  modified_base 20: mod_base = OTHER; note = 2'-O-methylguanosine-3'-phosphate
  modified_base 21: mod_base = OTHER; note = 2'-O-methyluridine-3'-phosphorothioate
  modified_base 22: mod_base = OTHER; note = 2'-O-methyladenosine-3'-phosphorothioate
  modified_base 23: mod_base = OTHER; note = 2'-O-methylcytidine-3'-phosphate
agaggtggaaggggtgtatgtac

SEQ ID NO: 3582 - DNA, 23 bp, synthetic construct
  source 1..23: mol_type = other DNA
  modified_base 1: mod_base = OTHER; note = 2'-O-methyladenosine-3'-phosphorothioate
  modified_base 2: mod_base = OTHER; note = 2'-deoxyguanosine-3'-phosphorothioate
  modified_base 3: mod_base = OTHER; note = 2'-O-methyladenosine-3'-phosphate
  modified_base 4: mod_base = OTHER; note = 2'-O-methylguanosine-3'-phosphate
  modified_base 6: mod_base = OTHER; note = 2'-O-methyluridine-3'-phosphate
  modified_base 8: mod_base = OTHER; note = 2'-O-methylguanosine-3'-phosphate
  modified_base 9: mod_base = OTHER; note = 2'-O-methyladenosine-3'-phosphate
  modified_base 10: mod_base = OTHER; note = 2'-O-methyladenosine-3'-phosphate
  modified_base 11: mod_base = OTHER; note = 2'-O-methylguanosine-3'-phosphate
  modified_base 13: mod_base = OTHER; note = 2'-O-methylguanosine-3'-phosphate
  modified_base 14: mod_base = OTHER; note = 2'-fluoroguanosine-3'-phosphate
  modified_base 15: mod_base = OTHER; note = 2'-O-methyluridine-3'-phosphate
  modified_base 16: mod_base = OTHER; note = 2'-O-methylguanosine-3'-phosphate
  modified_base 17: mod_base = OTHER; note = 2'-O-methyluridine-3'-phosphate
  modified_base 18: mod_base = OTHER; note = 2'-O-methyladenosine-3'-phosphate
  modified_base 19: mod_base = OTHER; note = 2'-O-methyluridine-3'-phosphate
  modified_base 20: mod_base = OTHER; note = 2'-O-methylguanosine-3'-phosphate
  modified_base 21: mod_base = OTHER; note = 2'-O-methyluridine-3'-phosphorothioate
  modified_base 22: mod_base = OTHER; note = 2'-O-methyladenosine-3'-phosphorothioate
  modified_base 23: mod_base = OTHER; note = 2'-O-methylcytidine-3'-phosphate
  misc_feature 1: note = RNA
  misc_feature 2: note = DNA
  misc_feature 3..4: note = RNA
  misc_feature 5: note = DNA
  misc_feature 6: note = RNA
  misc_feature 7: note = DNA
  misc_feature 8..11: note = RNA
  misc_feature 12: note = DNA
  misc_feature 13..23: note = RNA
agaggtggaaggggtgtatgtac

SEQ ID NO: 3583 - RNA, 23 nt, synthetic construct
  source 1..23: mol_type = other RNA
  modified_base 1: mod_base = OTHER; note = 2'-O-methyladenosine-3'-phosphorothioate
  modified_base 2: mod_base = OTHER; note = 2'-fluorocytidine-3'-phosphorothioate
  modified_base 3: mod_base = OTHER; note = 2'-O-methylguanosine-3'-phosphate
  modified_base 4: mod_base = OTHER; note = 2'-O-methyladenosine-3'-phosphate
  modified_base 5: mod_base = OTHER; note = 2'-O-methylguanosine-3'-phosphate
  modified_base 6: mod_base = OTHER; note = 2'-fluoroguanosine-3'-phosphate
  modified_base 7: mod_base = OTHER; note = 2'-O-methyluridine-3'-phosphate
  modified_base 8: mod_base = OTHER; note = 2'-fluoroguanosine-3'-phosphate
  modified_base 9: mod_base = OTHER; note = 2'-fluoroguanosine-3'-phosphate
  modified_base 10: mod_base = OTHER; note = 2'-O-methyladenosine-3'-phosphate
  modified_base 11: mod_base = OTHER; note = 2'-O-methyladenosine-3'-phosphate
  modified_base 12: mod_base = OTHER; note = 2'-O-methylguanosine-3'-phosphate
  modified_base 13: mod_base = OTHER; note = 2'-O-methylguanosine-3'-phosphate
  modified_base 14: mod_base = OTHER; note = 2'-fluoroguanosine-3'-phosphate
  modified_base 15: mod_base = OTHER; note = 2'-O-methylguanosine-3'-phosphate
  modified_base 16: mod_base = OTHER; note = 2'-fluorouridine-3'-phosphate
  modified_base 17: mod_base = OTHER; note = 2'-O-methylguanosine-3'-phosphate
  modified_base 18: mod_base = OTHER; note = 2'-O-methyluridine-3'-phosphate
  modified_base 19: mod_base = OTHER; note = 2'-O-methyladenosine-3'-phosphate
  modified_base 20: mod_base = OTHER; note = 2'-O-methyluridine-3'-phosphate
  modified_base 21: mod_base = OTHER; note = 2'-O-methylguanosine-3'-phosphorothioate
  modified_base 22: mod_base = OTHER; note = 2'-O-methyluridine-3'-phosphorothioate
  modified_base 23: mod_base = OTHER; note = 2'-O-methyladenosine-3'-phosphate
acgaggtggaaggggtgtatgta

SEQ ID NO: 3584 - DNA, 23 bp, synthetic construct
  source 1..23: mol_type = other DNA
  modified_base 1: mod_base = OTHER; note = 2'-O-methyladenosine-3'-phosphorothioate
  modified_base 2: mod_base = OTHER; note = 2'-deoxycytidine-3'-phosphorothioate
  modified_base 3: mod_base = OTHER; note = 2'-O-methylguanosine-3'-phosphate
  modified_base 4: mod_base = OTHER; note = 2'-O-methyladenosine-3'-phosphate
  modified_base 6: mod_base = OTHER; note = 2'-O-methylguanosine-3'-phosphate
  modified_base 8: mod_base = OTHER; note = 2'-O-methylguanosine-3'-phosphate
  modified_base 9: mod_base = OTHER; note = 2'-O-methylguanosine-3'-phosphate
  modified_base 10: mod_base = OTHER; note = 2'-O-methyladenosine-3'-phosphate
  modified_base 11: mod_base = OTHER; note = 2'-O-methyladenosine-3'-phosphate
  modified_base 13: mod_base = OTHER; note = 2'-O-methylguanosine-3'-phosphate
  modified_base 14: mod_base = OTHER; note = 2'-fluoroguanosine-3'-phosphate
  modified_base 15: mod_base = OTHER; note = 2'-O-methylguanosine-3'-phosphate
  modified_base 16: mod_base = OTHER; note = 2'-O-methyluridine-3'-phosphate
  modified_base 17: mod_base = OTHER; note = 2'-O-methylguanosine-3'-phosphate
  modified_base 18: mod_base = OTHER; note = 2'-O-methyluridine-3'-phosphate
  modified_base 19: mod_base = OTHER; note = 2'-O-methyladenosine-3'-phosphate
  modified_base 20: mod_base = OTHER; note = 2'-O-methyluridine-3'-phosphate
  modified_base 21: mod_base = OTHER; note = 2'-O-methylguanosine-3'-phosphorothioate
  modified_base 22: mod_base = OTHER; note = 2'-O-methyluridine-3'-phosphorothioate
  modified_base 23: mod_base = OTHER; note = 2'-O-methyladenosine-3'-phosphate
  misc_feature 1: note = RNA
  misc_feature 2: note = DNA
  misc_feature 3..4: note = RNA
  misc_feature 5: note = DNA
  misc_feature 6: note = RNA
  misc_feature 7: note = DNA
  misc_feature 8..11: note = RNA
  misc_feature 12: note = DNA
  misc_feature 13..23: note = RNA
acgaggtggaaggggtgtatgta

SEQ ID NO: 3585 - RNA, 23 nt, synthetic construct
  source 1..23: mol_type = other RNA
  modified_base 1: mod_base = OTHER; note = 2'-O-methyladenosine-3'-phosphorothioate
  modified_base 2: mod_base = OTHER; note = 2'-fluoroadenosine-3'-phosphorothioate
  modified_base 3: mod_base = OTHER; note = 2'-O-methylcytidine-3'-phosphate
  modified_base 4: mod_base = OTHER; note = 2'-O-methylguanosine-3'-phosphate
  modified_base 5: mod_base = OTHER; note = 2'-O-methyladenosine-3'-phosphate
  modified_base 6: mod_base = OTHER; note = 2'-fluoroguanosine-3'-phosphate
  modified_base 7: mod_base = OTHER; note = 2'-O-methylguanosine-3'-phosphate
  modified_base 8: mod_base = OTHER; note = 2'-fluorouridine-3'-phosphate
  modified_base 9: mod_base = OTHER; note = 2'-fluoroguanosine-3'-phosphate
  modified_base 10: mod_base = OTHER; note = 2'-O-methylguanosine-3'-phosphate
  modified_base 11: mod_base = OTHER; note = 2'-O-methyladenosine-3'-phosphate
  modified_base 12: mod_base = OTHER; note = 2'-O-methyladenosine-3'-phosphate
  modified_base 13: mod_base = OTHER; note = 2'-O-methylguanosine-3'-phosphate
  modified_base 14: mod_base = OTHER; note = 2'-fluoroguanosine-3'-phosphate
  modified_base 15: mod_base = OTHER; note = 2'-O-methylguanosine-3'-phosphate
  modified_base 16: mod_base = OTHER; note = 2'-fluoroguanosine-3'-phosphate
  modified_base 17: mod_base = OTHER; note = 2'-O-methyluridine-3'-phosphate
  modified_base 18: mod_base = OTHER; note = 2'-O-methylguanosine-3'-phosphate
  modified_base 19: mod_base = OTHER; note = 2'-O-methyluridine-3'-phosphate
  modified_base 20: mod_base = OTHER; note = 2'-O-methyladenosine-3'-phosphate
  modified_base 21: mod_base = OTHER; note = 2'-O-methyluridine-3'-phosphorothioate
  modified_base 22: mod_base = OTHER; note = 2'-O-methylguanosine-3'-phosphorothioate
  modified_base 23: mod_base = OTHER; note = 2'-O-methyluridine-3'-phosphate
aacgaggtggaaggggtgtatgt

SEQ ID NO: 3586 - DNA, 23 bp, synthetic construct
  source 1..23: mol_type = other DNA
  modified_base 1: mod_base = OTHER; note = 2'-O-methyladenosine-3'-phosphorothioate
  modified_base 2: mod_base = OTHER; note = 2'-deoxyadenosine-3'-phosphorothioate
  modified_base 3: mod_base = OTHER; note = 2'-O-methylcytidine-3'-phosphate
  modified_base 4: mod_base = OTHER; note = 2'-O-methylguanosine-3'-phosphate
  modified_base 6: mod_base = OTHER; note = 2'-O-methylguanosine-3'-phosphate
  modified_base 8: mod_base = OTHER; note = 2'-O-methyluridine-3'-phosphate
  modified_base 9: mod_base = OTHER; note = 2'-O-methylguanosine-3'-phosphate
  modified_base 10: mod_base = OTHER; note = 2'-O-methylguanosine-3'-phosphate
  modified_base 11: mod_base = OTHER; note = 2'-O-methyladenosine-3'-phosphate
  modified_base 13: mod_base = OTHER; note = 2'-O-methylguanosine-3'-phosphate
  modified_base 14: mod_base = OTHER; note = 2'-fluoroguanosine-3'-phosphate
  modified_base 15: mod_base = OTHER; note = 2'-O-methylguanosine-3'-phosphate
  modified_base 16: mod_base = OTHER; note = 2'-O-methylguanosine-3'-phosphate
  modified_base 17: mod_base = OTHER; note = 2'-O-methyluridine-3'-phosphate
  modified_base 18: mod_base = OTHER; note = 2'-O-methylguanosine-3'-phosphate
  modified_base 19: mod_base = OTHER; note = 2'-O-methyluridine-3'-phosphate
  modified_base 20: mod_base = OTHER; note = 2'-O-methyladenosine-3'-phosphate
  modified_base 21: mod_base = OTHER; note = 2'-O-methyluridine-3'-phosphorothioate
  modified_base 22: mod_base = OTHER; note = 2'-O-methylguanosine-3'-phosphorothioate
  modified_base 23: mod_base = OTHER; note = 2'-O-methyluridine-3'-phosphate
  misc_feature 1: note = RNA
  misc_feature 2: note = DNA
  misc_feature 3..4: note = RNA
  misc_feature 5: note = DNA
  misc_feature 6: note = RNA
  misc_feature 7: note = DNA
  misc_feature 8..11: note = RNA
  misc_feature 12: note = DNA
  misc_feature 13..23: note = RNA
aacgaggtggaaggggtgtatgt

SEQ ID NO: 3587 - RNA, 23 nt, synthetic construct
  source 1..23: mol_type = other RNA
  modified_base 1: mod_base = OTHER; note = 2'-O-methyladenosine-3'-phosphorothioate
  modified_base 2: mod_base = OTHER; note = 2'-fluorouridine -3'-phosphorothioate
  modified_base 3: mod_base = OTHER; note = 2'-O-methylguanosine-3'-phosphate
  modified_base 4: mod_base = OTHER; note = 2'-O-methylguanosine-3'-phosphate
  modified_base 5: mod_base = OTHER; note = 2'-O-methyladenosine-3'-phosphate
  modified_base 6: mod_base = OTHER; note = 2'-fluorouridine-3'-phosphate
  modified_base 7: mod_base = OTHER; note = 2'-O-methylguanosine-3'-phosphate
  modified_base 8: mod_base = OTHER; note = 2'-fluoroadenosine-3'-phosphate
  modified_base 9: mod_base = OTHER; note = 2'-fluorocytidine-3'-phosphate
  modified_base 10: mod_base = OTHER; note = 2'-O-methylguanosine-3'-phosphate
  modified_base 11: mod_base = OTHER; note = 2'-O-methyladenosine-3'-phosphate
  modified_base 12: mod_base = OTHER; note = 2'-O-methylguanosine-3'-phosphate
  modified_base 13: mod_base = OTHER; note = 2'-O-methylguanosine-3'-phosphate
  modified_base 14: mod_base = OTHER; note = 2'-fluorouridine-3'-phosphate
  modified_base 15: mod_base = OTHER; note = 2'-O-methylguanosine-3'-phosphate
  modified_base 16: mod_base = OTHER; note = 2'-fluoroguanosine-3'-phosphate
  modified_base 17: mod_base = OTHER; note = 2'-O-methyladenosine-3'-phosphate
  modified_base 18: mod_base = OTHER; note = 2'-O-methyladenosine-3'-phosphate
  modified_base 19: mod_base = OTHER; note = 2'-O-methylguanosine-3'-phosphate
  modified_base 20: mod_base = OTHER; note = 2'-O-methylguanosine-3'-phosphate
  modified_base 21: mod_base = OTHER; note = 2'-O-methylguanosine-3'-phosphorothioate
  modified_base 22: mod_base = OTHER; note = 2'-O-methylguanosine-3'-phosphorothioate
  modified_base 23: mod_base = OTHER; note = 2'-O-methyluridine-3'-phosphate
atggatgacgaggtggaaggggt

SEQ ID NO: 3588 - DNA, 23 bp, synthetic construct
  source 1..23: mol_type = other DNA
  modified_base 1: mod_base = OTHER; note = 2'-O-methyladenosine-3'-phosphorothioate
  modified_base 2: mod_base = OTHER; note = 2'-deoxythimidine-3'-phosphorothioate
  modified_base 3: mod_base = OTHER; note = 2'-O-methylguanosine-3'-phosphate
  modified_base 4: mod_base = OTHER; note = 2'-O-methylguanosine-3'-phosphate
  modified_base 6: mod_base = OTHER; note = 2'-O-methyluridine-3'-phosphate
  modified_base 8: mod_base = OTHER; note = 2'-O-methyladenosine-3'-phosphate
  modified_base 9: mod_base = OTHER; note = 2'-O-methylcytidine-3'-phosphate
  modified_base 10: mod_base = OTHER; note = 2'-O-methylguanosine-3'-phosphate
  modified_base 11: mod_base = OTHER; note = 2'-O-methyladenosine-3'-phosphate
  modified_base 13: mod_base = OTHER; note = 2'-O-methylguanosine-3'-phosphate
  modified_base 14: mod_base = OTHER; note = 2'-fluorouridine-3'-phosphate
  modified_base 15: mod_base = OTHER; note = 2'-O-methylguanosine-3'-phosphate
  modified_base 16: mod_base = OTHER; note = 2'-O-methylguanosine-3'-phosphate
  modified_base 17: mod_base = OTHER; note = 2'-O-methyladenosine-3'-phosphate
  modified_base 18: mod_base = OTHER; note = 2'-O-methyladenosine-3'-phosphate
  modified_base 19: mod_base = OTHER; note = 2'-O-methylguanosine-3'-phosphate
  modified_base 20: mod_base = OTHER; note = 2'-O-methylguanosine-3'-phosphate
  modified_base 21: mod_base = OTHER; note = 2'-O-methylguanosine-3'-phosphorothioate
  modified_base 22: mod_base = OTHER; note = 2'-O-methylguanosine-3'-phosphorothioate
  modified_base 23: mod_base = OTHER; note = 2'-O-methyluridine-3'-phosphate
  misc_feature 1: note = RNA
  misc_feature 2: note = DNA
  misc_feature 3..4: note = RNA
  misc_feature 5: note = DNA
  misc_feature 6: note = RNA
  misc_feature 7: note = DNA
  misc_feature 8..11: note = RNA
  misc_feature 12: note = DNA
  misc_feature 13..23: note = RNA
atggatgacgaggtggaaggggt

SEQ ID NO: 3589 - RNA, 23 nt, synthetic construct
  source 1..23: mol_type = other RNA
  modified_base 1: mod_base = OTHER; note = 2'-O-methyladenosine-3'-phosphorothioate
  modified_base 2: mod_base = OTHER; note = 2'-fluoroguanosine-3'-phosphorothioate
  modified_base 3: mod_base = OTHER; note = 2'-O-methyluridine-3'-phosphate
  modified_base 4: mod_base = OTHER; note = 2'-O-methylguanosine-3'-phosphate
  modified_base 5: mod_base = OTHER; note = 2'-O-methylguanosine-3'-phosphate
  modified_base 6: mod_base = OTHER; note = 2'-fluoroadenosine-3'-phosphate
  modified_base 7: mod_base = OTHER; note = 2'-O-methyluridine-3'-phosphate
  modified_base 8: mod_base = OTHER; note = 2'-fluoroguanosine-3'-phosphate
  modified_base 9: mod_base = OTHER; note = 2'-fluoroadenosine-3'-phosphate
  modified_base 10: mod_base = OTHER; note = 2'-O-methylcytidine-3'-phosphate
  modified_base 11: mod_base = OTHER; note = 2'-O-methylguanosine-3'-phosphate
  modified_base 12: mod_base = OTHER; note = 2'-O-methyladenosine-3'-phosphate
  modified_base 13: mod_base = OTHER; note = 2'-O-methylguanosine-3'-phosphate
  modified_base 14: mod_base = OTHER; note = 2'-fluoroguanosine-3'-phosphate
  modified_base 15: mod_base = OTHER; note = 2'-O-methyluridine-3'-phosphate
  modified_base 16: mod_base = OTHER; note = 2'-fluoroguanosine-3'-phosphate
  modified_base 17: mod_base = OTHER; note = 2'-O-methylguanosine-3'-phosphate
  modified_base 18: mod_base = OTHER; note = 2'-O-methyladenosine-3'-phosphate
  modified_base 19: mod_base = OTHER; note = 2'-O-methyladenosine-3'-phosphate
  modified_base 20: mod_base = OTHER; note = 2'-O-methylguanosine-3'-phosphate
  modified_base 21: mod_base = OTHER; note = 2'-O-methylguanosine-3'-phosphorothioate
  modified_base 22: mod_base = OTHER; note = 2'-O-methylguanosine-3'-phosphorothioate
  modified_base 23: mod_base = OTHER; note = 2'-O-methylguanosine-3'-phosphate
agtggatgacgaggtggaagggg

SEQ ID NO: 3590 - DNA, 23 bp, synthetic construct
  source 1..23: mol_type = other DNA
  modified_base 1: mod_base = OTHER; note = 2'-O-methyladenosine-3'-phosphorothioate
  modified_base 2: mod_base = OTHER; note = 2'-deoxyguanosine-3'-phosphorothioate
  modified_base 3: mod_base = OTHER; note = 2'-O-methyluridine-3'-phosphate
  modified_base 4: mod_base = OTHER; note = 2'-O-methylguanosine-3'-phosphate
  modified_base 6: mod_base = OTHER; note = 2'-O-methyladenosine-3'-phosphate
  modified_base 8: mod_base = OTHER; note = 2'-O-methylguanosine-3'-phosphate
  modified_base 9: mod_base = OTHER; note = 2'-O-methyladenosine-3'-phosphate
  modified_base 10: mod_base = OTHER; note = 2'-O-methylcytidine-3'-phosphate
  modified_base 11: mod_base = OTHER; note = 2'-O-methylguanosine-3'-phosphate
  modified_base 13: mod_base = OTHER; note = 2'-O-methylguanosine-3'-phosphate
  modified_base 14: mod_base = OTHER; note = 2'-fluoroguanosine-3'-phosphate
  modified_base 15: mod_base = OTHER; note = 2'-O-methyluridine-3'-phosphate
  modified_base 16: mod_base = OTHER; note = 2'-O-methylguanosine-3'-phosphate
  modified_base 17: mod_base = OTHER; note = 2'-O-methylguanosine-3'-phosphate
  modified_base 18: mod_base = OTHER; note = 2'-O-methyladenosine-3'-phosphate
  modified_base 19: mod_base = OTHER; note = 2'-O-methyladenosine-3'-phosphate
  modified_base 20: mod_base = OTHER; note = 2'-O-methylguanosine-3'-phosphate
  modified_base 21: mod_base = OTHER; note = 2'-O-methylguanosine-3'-phosphorothioate
  modified_base 22: mod_base = OTHER; note = 2'-O-methylguanosine-3'-phosphorothioate
  modified_base 23: mod_base = OTHER; note = 2'-O-methylguanosine-3'-phosphate
  misc_feature 1: note = RNA
  misc_feature 2: note = DNA
  misc_feature 3..4: note = RNA
  misc_feature 5: note = DNA
  misc_feature 6: note = RNA
  misc_feature 7: note = DNA
  misc_feature 8..11: note = RNA
  misc_feature 12: note = DNA
  misc_feature 13..23: note = RNA
agtggatgacgaggtggaagggg

SEQ ID NO: 3591 - RNA, 23 nt, synthetic construct
  source 1..23: mol_type = other RNA
  modified_base 1: mod_base = OTHER; note = 2'-O-methyladenosine-3'-phosphorothioate
  modified_base 2: mod_base = OTHER; note = 2'-fluorocytidine-3'-phosphorothioate
  modified_base 3: mod_base = OTHER; note = 2'-O-methylcytidine-3'-phosphate
  modified_base 4: mod_base = OTHER; note = 2'-O-methylcytidine-3'-phosphate
  modified_base 5: mod_base = OTHER; note = 2'-O-methyladenosine-3'-phosphate
  modified_base 6: mod_base = OTHER; note = 2'-fluorouridine-3'-phosphate
  modified_base 7: mod_base = OTHER; note = 2'-O-methyladenosine-3'-phosphate
  modified_base 8: mod_base = OTHER; note = 2'-fluoroguanosine-3'-phosphate
  modified_base 9: mod_base = OTHER; note = 2'-fluorocytidine-3'-phosphate
  modified_base 10: mod_base = OTHER; note = 2'-O-methyluridine-3'-phosphate
  modified_base 11: mod_base = OTHER; note = 2'-O-methylcytidine-3'-phosphate
  modified_base 12: mod_base = OTHER; note = 2'-O-methyladenosine-3'-phosphate
  modified_base 13: mod_base = OTHER; note = 2'-O-methylcytidine-3'-phosphate
  modified_base 14: mod_base = OTHER; note = 2'-fluorouridine-3'-phosphate
  modified_base 15: mod_base = OTHER; note = 2'-O-methylguanosine-3'-phosphate
  modified_base 16: mod_base = OTHER; note = 2'-fluorouridine-3'-phosphate
  modified_base 17: mod_base = OTHER; note = 2'-O-methylguanosine-3'-phosphate
  modified_base 18: mod_base = OTHER; note = 2'-O-methylcytidine-3'-phosphate
  modified_base 19: mod_base = OTHER; note = 2'-O-methyladenosine-3'-phosphate
  modified_base 20: mod_base = OTHER; note = 2'-O-methyluridine-3'-phosphate
  modified_base 21: mod_base = OTHER; note = 2'-O-methylguanosine-3'-phosphorothioate
  modified_base 22: mod_base = OTHER; note = 2'-O-methylcytidine-3'-phosphorothioate
  modified_base 23: mod_base = OTHER; note = 2'-O-methylcytidine-3'-phosphate
acccatagctcactgtgcatgcc

SEQ ID NO: 3592 - DNA, 23 bp, synthetic construct
  source 1..23: mol_type = other DNA
  modified_base 1: mod_base = OTHER; note = 2'-O-methyladenosine-3'-phosphorothioate
  modified_base 2: mod_base = OTHER; note = 2'-deoxycytidine-3'-phosphorothioate
  modified_base 3: mod_base = OTHER; note = 2'-O-methylcytidine-3'-phosphate
  modified_base 4: mod_base = OTHER; note = 2'-O-methylcytidine-3'-phosphate
  modified_base 6: mod_base = OTHER; note = 2'-O-methyluridine-3'-phosphate
  modified_base 8: mod_base = OTHER; note = 2'-O-methylguanosine-3'-phosphate
  modified_base 9: mod_base = OTHER; note = 2'-O-methylcytidine-3'-phosphate
  modified_base 10: mod_base = OTHER; note = 2'-O-methyluridine-3'-phosphate
  modified_base 11: mod_base = OTHER; note = 2'-O-methylcytidine-3'-phosphate
  modified_base 13: mod_base = OTHER; note = 2'-O-methylcytidine-3'-phosphate
  modified_base 14: mod_base = OTHER; note = 2'-fluorouridine-3'-phosphate
  modified_base 15: mod_base = OTHER; note = 2'-O-methylguanosine-3'-phosphate
  modified_base 16: mod_base = OTHER; note = 2'-O-methyluridine-3'-phosphate
  modified_base 17: mod_base = OTHER; note = 2'-O-methylguanosine-3'-phosphate
  modified_base 18: mod_base = OTHER; note = 2'-O-methylcytidine-3'-phosphate
  modified_base 19: mod_base = OTHER; note = 2'-O-methyladenosine-3'-phosphate
  modified_base 20: mod_base = OTHER; note = 2'-O-methyluridine-3'-phosphate
  modified_base 21: mod_base = OTHER; note = 2'-O-methylguanosine-3'-phosphorothioate
  modified_base 22: mod_base = OTHER; note = 2'-O-methylcytidine-3'-phosphorothioate
  modified_base 23: mod_base = OTHER; note = 2'-O-methylcytidine-3'-phosphate
  misc_feature 1: note = RNA
  misc_feature 2: note = DNA
  misc_feature 3..4: note = RNA
  misc_feature 5: note = DNA
  misc_feature 6: note = RNA
  misc_feature 7: note = DNA
  misc_feature 8..11: note = RNA
  misc_feature 12: note = DNA
  misc_feature 13..23: note = RNA
acccatagctcactgtgcatgcc

SEQ ID NO: 3593 - RNA, 23 nt, synthetic construct
  source 1..23: mol_type = other RNA
  modified_base 1: mod_base = OTHER; note = 2'-O-methyladenosine-3'-phosphorothioate
  modified_base 2: mod_base = OTHER; note = 2'-fluorocytidine-3'-phosphorothioate
  modified_base 3: mod_base = OTHER; note = 2'-O-methylcytidine-3'-phosphate
  modified_base 4: mod_base = OTHER; note = 2'-O-methylcytidine-3'-phosphate
  modified_base 5: mod_base = OTHER; note = 2'-O-methylcytidine-3'-phosphate
  modified_base 6: mod_base = OTHER; note = 2'-fluoroadenosine-3'-phosphate
  modified_base 7: mod_base = OTHER; note = 2'-O-methyluridine-3'-phosphate
  modified_base 8: mod_base = OTHER; note = 2'-fluoroadenosine-3'-phosphate
  modified_base 9: mod_base = OTHER; note = 2'-fluoroguanosine-3'-phosphate
  modified_base 10: mod_base = OTHER; note = 2'-O-methylcytidine-3'-phosphate
  modified_base 11: mod_base = OTHER; note = 2'-O-methyluridine-3'-phosphate
  modified_base 12: mod_base = OTHER; note = 2'-O-methylcytidine-3'-phosphate
  modified_base 13: mod_base = OTHER; note = 2'-O-methyladenosine-3'-phosphate
  modified_base 14: mod_base = OTHER; note = 2'-fluorocytidine-3'-phosphate
  modified_base 15: mod_base = OTHER; note = 2'-O-methyluridine-3'-phosphate
  modified_base 16: mod_base = OTHER; note = 2'-fluoroguanosine-3'-phosphate
  modified_base 17: mod_base = OTHER; note = 2'-O-methyluridine-3'-phosphate
  modified_base 18: mod_base = OTHER; note = 2'-O-methylguanosine-3'-phosphate
  modified_base 19: mod_base = OTHER; note = 2'-O-methylcytidine-3'-phosphate
  modified_base 20: mod_base = OTHER; note = 2'-O-methyladenosine-3'-phosphate
  modified_base 21: mod_base = OTHER; note = 2'-O-methyluridine-3'-phosphorothioate
  modified_base 22: mod_base = OTHER; note = 2'-O-methylguanosine-3'-phosphorothioate
  modified_base 23: mod_base = OTHER; note = 2'-O-methylcytidine-3'-phosphate
accccatagctcactgtgcatgc

SEQ ID NO: 3594 - DNA, 23 bp, synthetic construct
  source 1..23: mol_type = other DNA
  modified_base 1: mod_base = OTHER; note = 2'-O-methyladenosine-3'-phosphorothioate
  modified_base 2: mod_base = OTHER; note = 2'-deoxycytidine-3'-phosphorothioate
  modified_base 3: mod_base = OTHER; note = 2'-O-methylcytidine-3'-phosphate
  modified_base 4: mod_base = OTHER; note = 2'-O-methylcytidine-3'-phosphate
  modified_base 6: mod_base = OTHER; note = 2'-O-methyladenosine-3'-phosphate
  modified_base 8: mod_base = OTHER; note = 2'-O-methyladenosine-3'-phosphate
  modified_base 9: mod_base = OTHER; note = 2'-O-methylguanosine-3'-phosphate
  modified_base 10: mod_base = OTHER; note = 2'-O-methylcytidine-3'-phosphate
  modified_base 11: mod_base = OTHER; note = 2'-O-methyluridine-3'-phosphate
  modified_base 13: mod_base = OTHER; note = 2'-O-methyladenosine-3'-phosphate
  modified_base 14: mod_base = OTHER; note = 2'-fluorocytidine-3'-phosphate
  modified_base 15: mod_base = OTHER; note = 2'-O-methyluridine-3'-phosphate
  modified_base 16: mod_base = OTHER; note = 2'-O-methylguanosine-3'-phosphate
  modified_base 17: mod_base = OTHER; note = 2'-O-methyluridine-3'-phosphate
  modified_base 18: mod_base = OTHER; note = 2'-O-methylguanosine-3'-phosphate
  modified_base 19: mod_base = OTHER; note = 2'-O-methylcytidine-3'-phosphate
  modified_base 20: mod_base = OTHER; note = 2'-O-methyladenosine-3'-phosphate
  modified_base 21: mod_base = OTHER; note = 2'-O-methyluridine-3'-phosphorothioate
  modified_base 22: mod_base = OTHER; note = 2'-O-methylguanosine-3'-phosphorothioate
  modified_base 23: mod_base = OTHER; note = 2'-O-methylcytidine-3'-phosphate
  misc_feature 1: note = RNA
  misc_feature 2: note = DNA
  misc_feature 3..4: note = RNA
  misc_feature 5: note = DNA
  misc_feature 6: note = RNA
  misc_feature 7: note = DNA
  misc_feature 8..11: note = RNA
  misc_feature 12: note = DNA
  misc_feature 13..23: note = RNA
accccatagctcactgtgcatgc

SEQ ID NO: 3595 - RNA, 23 nt, synthetic construct
  source 1..23: mol_type = other RNA
  modified_base 1: mod_base = OTHER; note = 2'-O-methyladenosine-3'-phosphorothioate
  modified_base 2: mod_base = OTHER; note = 2'-fluoroadenosine-3'-phosphorothioate
  modified_base 3: mod_base = OTHER; note = 2'-O-methylguanosine-3'-phosphate
  modified_base 4: mod_base = OTHER; note = 2'-O-methyladenosine-3'-phosphate
  modified_base 5: mod_base = OTHER; note = 2'-O-methylcytidine-3'-phosphate
  modified_base 6: mod_base = OTHER; note = 2'-fluoroadenosine-3'-phosphate
  modified_base 7: mod_base = OTHER; note = 2'-O-methylguanosine-3'-phosphate
  modified_base 8: mod_base = OTHER; note = 2'-fluorocytidine-3'-phosphate
  modified_base 9: mod_base = OTHER; note = 2'-fluorocytidine-3'-phosphate
  modified_base 10: mod_base = OTHER; note = 2'-O-methylguanosine-3'-phosphate
  modified_base 11: mod_base = OTHER; note = 2'-O-methyluridine-3'-phosphate
  modified_base 12: mod_base = OTHER; note = 2'-O-methyluridine-3'-phosphate
  modified_base 13: mod_base = OTHER; note = 2'-O-methylguanosine-3'-phosphate
  modified_base 14: mod_base = OTHER; note = 2'-fluoroguanosine-3'-phosphate
  modified_base 15: mod_base = OTHER; note = 2'-O-methylguanosine-3'-phosphate
  modified_base 16: mod_base = OTHER; note = 2'-fluoroguanosine-3'-phosphate
  modified_base 17: mod_base = OTHER; note = 2'-O-methyladenosine-3'-phosphate
  modified_base 18: mod_base = OTHER; note = 2'-O-methylguanosine-3'-phosphate
  modified_base 19: mod_base = OTHER; note = 2'-O-methyladenosine-3'-phosphate
  modified_base 20: mod_base = OTHER; note = 2'-O-methylguanosine-3'-phosphate
  modified_base 21: mod_base = OTHER; note = 2'-O-methylguanosine-3'-phosphorothioate
  modified_base 22: mod_base = OTHER; note = 2'-O-methyladenosine-3'-phosphorothioate
  modified_base 23: mod_base = OTHER; note = 2'-O-methylcytidine-3'-phosphate
aagacagccgttggggagaggac

SEQ ID NO: 3596 - DNA, 23 bp, synthetic construct
  source 1..23: mol_type = other DNA
  modified_base 1: mod_base = OTHER; note = 2'-O-methyladenosine-3'-phosphorothioate
  modified_base 2: mod_base = OTHER; note = 2'-deoxyadenosine-3'-phosphorothioate
  modified_base 3: mod_base = OTHER; note = 2'-O-methylguanosine-3'-phosphate
  modified_base 4: mod_base = OTHER; note = 2'-O-methyladenosine-3'-phosphate
  modified_base 6: mod_base = OTHER; note = 2'-O-methyladenosine-3'-phosphate
  modified_base 8: mod_base = OTHER; note = 2'-O-methylcytidine-3'-phosphate
  modified_base 9: mod_base = OTHER; note = 2'-O-methylcytidine-3'-phosphate
  modified_base 10: mod_base = OTHER; note = 2'-O-methylguanosine-3'-phosphate
  modified_base 11: mod_base = OTHER; note = 2'-O-methyluridine-3'-phosphate
  modified_base 13: mod_base = OTHER; note = 2'-O-methylguanosine-3'-phosphate
  modified_base 14: mod_base = OTHER; note = 2'-fluoroguanosine-3'-phosphate
  modified_base 15: mod_base = OTHER; note = 2'-O-methylguanosine-3'-phosphate
  modified_base 16: mod_base = OTHER; note = 2'-O-methylguanosine-3'-phosphate
  modified_base 17: mod_base = OTHER; note = 2'-O-methyladenosine-3'-phosphate
  modified_base 18: mod_base = OTHER; note = 2'-O-methylguanosine-3'-phosphate
  modified_base 19: mod_base = OTHER; note = 2'-O-methyladenosine-3'-phosphate
  modified_base 20: mod_base = OTHER; note = 2'-O-methylguanosine-3'-phosphate
  modified_base 21: mod_base = OTHER; note = 2'-O-methylguanosine-3'-phosphorothioate
  modified_base 22: mod_base = OTHER; note = 2'-O-methyladenosine-3'-phosphorothioate
  modified_base 23: mod_base = OTHER; note = 2'-O-methylcytidine-3'-phosphate
  misc_feature 1: note = RNA
  misc_feature 2: note = DNA
  misc_feature 3..4: note = RNA
  misc_feature 5: note = DNA
  misc_feature 6: note = RNA
  misc_feature 7: note = DNA
  misc_feature 8..11: note = RNA
  misc_feature 12: note = DNA
  misc_feature 13..23: note = RNA
aagacagccgttggggagaggac

SEQ ID NO: 3597 - RNA, 23 nt, synthetic construct
  source 1..23: mol_type = other RNA
  modified_base 1: mod_base = OTHER; note = 2'-O-methyladenosine-3'-phosphorothioate
  modified_base 2: mod_base = OTHER; note = 2'-fluoroadenosine-3'-phosphorothioate
  modified_base 3: mod_base = OTHER; note = 2'-O-methyladenosine-3'-phosphate
  modified_base 4: mod_base = OTHER; note = 2'-O-methyladenosine-3'-phosphate
  modified_base 5: mod_base = OTHER; note = 2'-O-methyladenosine-3'-phosphate
  modified_base 6: mod_base = OTHER; note = 2'-fluoroadenosine-3'-phosphate
  modified_base 7: mod_base = OTHER; note = 2'-O-methyluridine-3'-phosphate
  modified_base 8: mod_base = OTHER; note = 2'-fluoroguanosine-3'-phosphate
  modified_base 9: mod_base = OTHER; note = 2'-fluorocytidine-3'-phosphate
  modified_base 10: mod_base = OTHER; note = 2'-O-methyluridine-3'-phosphate
  modified_base 11: mod_base = OTHER; note = 2'-O-methylguanosine-3'-phosphate
  modified_base 12: mod_base = OTHER; note = 2'-O-methyluridine-3'-phosphate
  modified_base 13: mod_base = OTHER; note = 2'-O-methyluridine-3'-phosphate
  modified_base 14: mod_base = OTHER; note = 2'-fluorocytidine-3'-phosphate
  modified_base 15: mod_base = OTHER; note = 2'-O-methyladenosine-3'-phosphate
  modified_base 16: mod_base = OTHER; note = 2'-fluoroguanosine-3'-phosphate
  modified_base 17: mod_base = OTHER; note = 2'-O-methylcytidine-3'-phosphate
  modified_base 18: mod_base = OTHER; note = 2'-O-methyladenosine-3'-phosphate
  modified_base 19: mod_base = OTHER; note = 2'-O-methylcytidine-3'-phosphate
  modified_base 20: mod_base = OTHER; note = 2'-O-methylcytidine-3'-phosphate
  modified_base 21: mod_base = OTHER; note = 2'-O-methyluridine-3'-phosphorothioate
  modified_base 22: mod_base = OTHER; note = 2'-O-methylcytidine-3'-phosphorothioate
  modified_base 23: mod_base = OTHER; note = 2'-O-methylcytidine-3'-phosphate
aaaaaatgctgttcagcacctcc

SEQ ID NO: 3598 - RNA, 23 nt, synthetic construct
  source 1..23: mol_type = other RNA
  modified_base 1: mod_base = OTHER; note = 2'-O-methyladenosine-3'-phosphorothioate
  modified_base 2: mod_base = OTHER; note = 2'-fluoroadenosine-3'-phosphorothioate
  modified_base 3: mod_base = OTHER; note = 2'-O-methyladenosine-3'-phosphate
  modified_base 4: mod_base = OTHER; note = 2'-O-methyladenosine-3'-phosphate
  modified_base 5: mod_base = OTHER; note = 2'-O-methyladenosine-3'-phosphate
  modified_base 6: mod_base = OTHER; note = 2'-fluoroadenosine-3'-phosphate
  modified_base 7: mod_base = OTHER; note = 2'-O-methyladenosine-3'-phosphate
  modified_base 8: mod_base = OTHER; note = 2'-fluorouridine-3'-phosphate
  modified_base 9: mod_base = OTHER; note = 2'-fluoroguanosine-3'-phosphate
  modified_base 10: mod_base = OTHER; note = 2'-O-methylcytidine-3'-phosphate
  modified_base 11: mod_base = OTHER; note = 2'-O-methyluridine-3'-phosphate
  modified_base 12: mod_base = OTHER; note = 2'-O-methylguanosine-3'-phosphate
  modified_base 13: mod_base = OTHER; note = 2'-O-methyluridine-3'-phosphate
  modified_base 14: mod_base = OTHER; note = 2'-fluorouridine-3'-phosphate
  modified_base 15: mod_base = OTHER; note = 2'-O-methylcytidine-3'-phosphate
  modified_base 16: mod_base = OTHER; note = 2'-fluoroadenosine-3'-phosphate
  modified_base 17: mod_base = OTHER; note = 2'-O-methylguanosine-3'-phosphate
  modified_base 18: mod_base = OTHER; note = 2'-O-methylcytidine-3'-phosphate
  modified_base 19: mod_base = OTHER; note = 2'-O-methyladenosine-3'-phosphate
  modified_base 20: mod_base = OTHER; note = 2'-O-methylcytidine-3'-phosphate
  modified_base 21: mod_base = OTHER; note = 2'-O-methylcytidine-3'-phosphorothioate
  modified_base 22: mod_base = OTHER; note = 2'-O-methyluridine-3'-phosphorothioate
  modified_base 23: mod_base = OTHER; note = 2'-O-methylcytidine-3'-phosphate
aaaaaaatgctgttcagcacctc

SEQ ID NO: 3599 - RNA, 23 nt, synthetic construct
  source 1..23: mol_type = other RNA
  modified_base 1: mod_base = OTHER; note = 2'-O-methyladenosine-3'-phosphorothioate
  modified_base 2: mod_base = OTHER; note = 2'-fluoroadenosine-3'-phosphorothioate
  modified_base 3: mod_base = OTHER; note = 2'-O-methyladenosine-3'-phosphate
  modified_base 4: mod_base = OTHER; note = 2'-O-methyladenosine-3'-phosphate
  modified_base 5: mod_base = OTHER; note = 2'-O-methyladenosine-3'-phosphate
  modified_base 6: mod_base = OTHER; note = 2'-fluoroadenosine-3'-phosphate
  modified_base 7: mod_base = OTHER; note = 2'-O-methyladenosine-3'-phosphate
  modified_base 8: mod_base = OTHER; note = 2'-fluoroadenosine-3'-phosphate
  modified_base 9: mod_base = OTHER; note = 2'-fluorouridine-3'-phosphate
  modified_base 10: mod_base = OTHER; note = 2'-O-methylguanosine-3'-phosphate
  modified_base 11: mod_base = OTHER; note = 2'-O-methylcytidine-3'-phosphate
  modified_base 12: mod_base = OTHER; note = 2'-O-methyluridine-3'-phosphate
  modified_base 13: mod_base = OTHER; note = 2'-O-methylguanosine-3'-phosphate
  modified_base 14: mod_base = OTHER; note = 2'-fluorouridine-3'-phosphate
  modified_base 15: mod_base = OTHER; note = 2'-O-methyluridine-3'-phosphate
  modified_base 16: mod_base = OTHER; note = 2'-fluorocytidine-3'-phosphate
  modified_base 17: mod_base = OTHER; note = 2'-O-methyladenosine-3'-phosphate
  modified_base 18: mod_base = OTHER; note = 2'-O-methylguanosine-3'-phosphate
  modified_base 19: mod_base = OTHER; note = 2'-O-methylcytidine-3'-phosphate
  modified_base 20: mod_base = OTHER; note = 2'-O-methyladenosine-3'-phosphate
  modified_base 21: mod_base = OTHER; note = 2'-O-methylcytidine-3'-phosphorothioate
  modified_base 22: mod_base = OTHER; note = 2'-O-methylcytidine-3'-phosphorothioate
  modified_base 23: mod_base = OTHER; note = 2'-O-methyluridine-3'-phosphate
aaaaaaaatgctgttcagcacct

SEQ ID NO: 3600 - RNA, 23 nt, synthetic construct
  source 1..23: mol_type = other RNA
  modified_base 1: mod_base = OTHER; note = 2'-O-methyladenosine-3'-phosphorothioate
  modified_base 2: mod_base = OTHER; note = 2'-fluoroadenosine-3'-phosphorothioate
  modified_base 3: mod_base = OTHER; note = 2'-O-methyladenosine-3'-phosphate
  modified_base 4: mod_base = OTHER; note = 2'-O-methyladenosine-3'-phosphate
  modified_base 5: mod_base = OTHER; note = 2'-O-methyladenosine-3'-phosphate
  modified_base 6: mod_base = OTHER; note = 2'-fluoroadenosine-3'-phosphate
  modified_base 7: mod_base = OTHER; note = 2'-O-methyladenosine-3'-phosphate
  modified_base 8: mod_base = OTHER; note = 2'-fluoroadenosine-3'-phosphate
  modified_base 9: mod_base = OTHER; note = 2'-fluoroadenosine-3'-phosphate
  modified_base 10: mod_base = OTHER; note = 2'-O-methyluridine-3'-phosphate
  modified_base 11: mod_base = OTHER; note = 2'-O-methylguanosine-3'-phosphate
  modified_base 12: mod_base = OTHER; note = 2'-O-methylcytidine-3'-phosphate
  modified_base 13: mod_base = OTHER; note = 2'-O-methyluridine-3'-phosphate
  modified_base 14: mod_base = OTHER; note = 2'-fluoroguanosine-3'-phosphate
  modified_base 15: mod_base = OTHER; note = 2'-O-methyluridine-3'-phosphate
  modified_base 16: mod_base = OTHER; note = 2'-fluorouridine-3'-phosphate
  modified_base 17: mod_base = OTHER; note = 2'-O-methylcytidine-3'-phosphate
  modified_base 18: mod_base = OTHER; note = 2'-O-methyladenosine-3'-phosphate
  modified_base 19: mod_base = OTHER; note = 2'-O-methylguanosine-3'-phosphate
  modified_base 20: mod_base = OTHER; note = 2'-O-methylcytidine-3'-phosphate
  modified_base 21: mod_base = OTHER; note = 2'-O-methyladenosine-3'-phosphorothioate
  modified_base 22: mod_base = OTHER; note = 2'-O-methylcytidine-3'-phosphorothioate
  modified_base 23: mod_base = OTHER; note = 2'-O-methylcytidine-3'-phosphate
aaaaaaaaatgctgttcagcacc

SEQ ID NO: 3601 - RNA, 23 nt, synthetic construct
  source 1..23: mol_type = other RNA
  modified_base 1: mod_base = OTHER; note = 2'-O-methyladenosine-3'-phosphorothioate
  modified_base 2: mod_base = OTHER; note = 2'-fluorocytidine-3'-phosphorothioate
  modified_base 3: mod_base = OTHER; note = 2'-O-methyladenosine-3'-phosphate
  modified_base 4: mod_base = OTHER; note = 2'-O-methyladenosine-3'-phosphate
  modified_base 5: mod_base = OTHER; note = 2'-O-methyladenosine-3'-phosphate
  modified_base 6: mod_base = OTHER; note = 2'-fluoroadenosine-3'-phosphate
  modified_base 7: mod_base = OTHER; note = 2'-O-methyladenosine-3'-phosphate
  modified_base 8: mod_base = OTHER; note = 2'-fluoroadenosine-3'-phosphate
  modified_base 9: mod_base = OTHER; note = 2'-fluoroadenosine-3'-phosphate
  modified_base 10: mod_base = OTHER; note = 2'-O-methyladenosine-3'-phosphate
  modified_base 11: mod_base = OTHER; note = 2'-O-methyluridine-3'-phosphate
  modified_base 12: mod_base = OTHER; note = 2'-O-methylguanosine-3'-phosphate
  modified_base 13: mod_base = OTHER; note = 2'-O-methylcytidine-3'-phosphate
  modified_base 14: mod_base = OTHER; note = 2'-fluorouridine-3'-phosphate
  modified_base 15: mod_base = OTHER; note = 2'-O-methylguanosine-3'-phosphate
  modified_base 16: mod_base = OTHER; note = 2'-fluorouridine-3'-phosphate
  modified_base 17: mod_base = OTHER; note = 2'-O-methyluridine-3'-phosphate
  modified_base 18: mod_base = OTHER; note = 2'-O-methylcytidine-3'-phosphate
  modified_base 19: mod_base = OTHER; note = 2'-O-methyladenosine-3'-phosphate
  modified_base 20: mod_base = OTHER; note = 2'-O-methylguanosine-3'-phosphate
  modified_base 21: mod_base = OTHER; note = 2'-O-methylcytidine-3'-phosphorothioate
  modified_base 22: mod_base = OTHER; note = 2'-O-methyladenosine-3'-phosphorothioate
  modified_base 23: mod_base = OTHER; note = 2'-O-methylcytidine-3'-phosphate
acaaaaaaaatgctgttcagcac

SEQ ID NO: 3602 - RNA, 23 nt, synthetic construct
  source 1..23: mol_type = other RNA
  modified_base 1: mod_base = OTHER; note = 2'-O-methyladenosine-3'-phosphorothioate
  modified_base 2: mod_base = OTHER; note = 2'-fluorouridine -3'-phosphorothioate
  modified_base 3: mod_base = OTHER; note = 2'-O-methylcytidine-3'-phosphate
  modified_base 4: mod_base = OTHER; note = 2'-O-methyladenosine-3'-phosphate
  modified_base 5: mod_base = OTHER; note = 2'-O-methyladenosine-3'-phosphate
  modified_base 6: mod_base = OTHER; note = 2'-fluoroadenosine-3'-phosphate
  modified_base 7: mod_base = OTHER; note = 2'-O-methyladenosine-3'-phosphate
  modified_base 8: mod_base = OTHER; note = 2'-fluoroadenosine-3'-phosphate
  modified_base 9: mod_base = OTHER; note = 2'-fluoroadenosine-3'-phosphate
  modified_base 10: mod_base = OTHER; note = 2'-O-methyladenosine-3'-phosphate
  modified_base 11: mod_base = OTHER; note = 2'-O-methyladenosine-3'-phosphate
  modified_base 12: mod_base = OTHER; note = 2'-O-methyluridine-3'-phosphate
  modified_base 13: mod_base = OTHER; note = 2'-O-methylguanosine-3'-phosphate
  modified_base 14: mod_base = OTHER; note = 2'-fluorocytidine-3'-phosphate
  modified_base 15: mod_base = OTHER; note = 2'-O-methyluridine-3'-phosphate
  modified_base 16: mod_base = OTHER; note = 2'-fluoroguanosine-3'-phosphate
  modified_base 17: mod_base = OTHER; note = 2'-O-methyluridine-3'-phosphate
  modified_base 18: mod_base = OTHER; note = 2'-O-methyluridine-3'-phosphate
  modified_base 19: mod_base = OTHER; note = 2'-O-methylcytidine-3'-phosphate
  modified_base 20: mod_base = OTHER; note = 2'-O-methyladenosine-3'-phosphate
  modified_base 21: mod_base = OTHER; note = 2'-O-methylguanosine-3'-phosphorothioate
  modified_base 22: mod_base = OTHER; note = 2'-O-methylcytidine-3'-phosphorothioate
  modified_base 23: mod_base = OTHER; note = 2'-O-methyladenosine-3'-phosphate
atcaaaaaaaatgctgttcagca

SEQ ID NO: 3603 - RNA, 23 nt, synthetic construct
  source 1..23: mol_type = other RNA
  modified_base 1: mod_base = OTHER; note = 2'-O-methyladenosine-3'-phosphorothioate
  modified_base 2: mod_base = OTHER; note = 2'-fluoroguanosine-3'-phosphorothioate
  modified_base 3: mod_base = OTHER; note = 2'-O-methyladenosine-3'-phosphate
  modified_base 4: mod_base = OTHER; note = 2'-O-methyladenosine-3'-phosphate
  modified_base 5: mod_base = OTHER; note = 2'-O-methyladenosine-3'-phosphate
  modified_base 6: mod_base = OTHER; note = 2'-fluoroadenosine-3'-phosphate
  modified_base 7: mod_base = OTHER; note = 2'-O-methylguanosine-3'-phosphate
  modified_base 8: mod_base = OTHER; note = 2'-fluoroguanosine-3'-phosphate
  modified_base 9: mod_base = OTHER; note = 2'-fluorouridine-3'-phosphate
  modified_base 10: mod_base = OTHER; note = 2'-O-methylguanosine-3'-phosphate
  modified_base 11: mod_base = OTHER; note = 2'-O-methylguanosine-3'-phosphate
  modified_base 12: mod_base = OTHER; note = 2'-O-methylguanosine-3'-phosphate
  modified_base 13: mod_base = OTHER; note = 2'-O-methyladenosine-3'-phosphate
  modified_base 14: mod_base = OTHER; note = 2'-fluoroguanosine-3'-phosphate
  modified_base 15: mod_base = OTHER; note = 2'-O-methyladenosine-3'-phosphate
  modified_base 16: mod_base = OTHER; note = 2'-fluorocytidine-3'-phosphate
  modified_base 17: mod_base = OTHER; note = 2'-O-methyluridine-3'-phosphate
  modified_base 18: mod_base = OTHER; note = 2'-O-methylguanosine-3'-phosphate
  modified_base 19: mod_base = OTHER; note = 2'-O-methylguanosine-3'-phosphate
  modified_base 20: mod_base = OTHER; note = 2'-O-methylguanosine-3'-phosphate
  modified_base 21: mod_base = OTHER; note = 2'-O-methylguanosine-3'-phosphorothioate
  modified_base 22: mod_base = OTHER; note = 2'-O-methylguanosine-3'-phosphorothioate
  modified_base 23: mod_base = OTHER; note = 2'-O-methyluridine-3'-phosphate
agaaaaggtgggagactgggggt

SEQ ID NO: 3604 - DNA, 23 bp, synthetic construct
  source 1..23: mol_type = other DNA
  modified_base 1: mod_base = OTHER; note = 2'-O-methyladenosine-3'-phosphorothioate
  modified_base 2: mod_base = OTHER; note = 2'-deoxyguanosine-3'-phosphorothioate
  modified_base 3: mod_base = OTHER; note = 2'-O-methyladenosine-3'-phosphate
  modified_base 4: mod_base = OTHER; note = 2'-O-methyladenosine-3'-phosphate
  modified_base 6: mod_base = OTHER; note = 2'-O-methyladenosine-3'-phosphate
  modified_base 8: mod_base = OTHER; note = 2'-O-methylguanosine-3'-phosphate
  modified_base 9: mod_base = OTHER; note = 2'-O-methyluridine-3'-phosphate
  modified_base 10: mod_base = OTHER; note = 2'-O-methylguanosine-3'-phosphate
  modified_base 11: mod_base = OTHER; note = 2'-O-methylguanosine-3'-phosphate
  modified_base 13: mod_base = OTHER; note = 2'-O-methyladenosine-3'-phosphate
  modified_base 14: mod_base = OTHER; note = 2'-fluoroguanosine-3'-phosphate
  modified_base 15: mod_base = OTHER; note = 2'-O-methyladenosine-3'-phosphate
  modified_base 16: mod_base = OTHER; note = 2'-O-methylcytidine-3'-phosphate
  modified_base 17: mod_base = OTHER; note = 2'-O-methyluridine-3'-phosphate
  modified_base 18: mod_base = OTHER; note = 2'-O-methylguanosine-3'-phosphate
  modified_base 19: mod_base = OTHER; note = 2'-O-methylguanosine-3'-phosphate
  modified_base 20: mod_base = OTHER; note = 2'-O-methylguanosine-3'-phosphate
  modified_base 21: mod_base = OTHER; note = 2'-O-methylguanosine-3'-phosphorothioate
  modified_base 22: mod_base = OTHER; note = 2'-O-methylguanosine-3'-phosphorothioate
  modified_base 23: mod_base = OTHER; note = 2'-O-methyluridine-3'-phosphate
  misc_feature 1: note = RNA
  misc_feature 2: note = DNA
  misc_feature 3..4: note = RNA
  misc_feature 5: note = DNA
  misc_feature 6: note = RNA
  misc_feature 7: note = DNA
  misc_feature 8..11: note = RNA
  misc_feature 12: note = DNA
  misc_feature 13..23: note = RNA
agaaaaggtgggagactgggggt

SEQ ID NO: 3605 - RNA, 23 nt, synthetic construct
  source 1..23: mol_type = other RNA
  modified_base 1: mod_base = OTHER; note = 2'-O-methyladenosine-3'-phosphorothioate
  modified_base 2: mod_base = OTHER; note = 2'-fluoroadenosine-3'-phosphorothioate
  modified_base 3: mod_base = OTHER; note = 2'-O-methylguanosine-3'-phosphate
  modified_base 4: mod_base = OTHER; note = 2'-O-methyladenosine-3'-phosphate
  modified_base 5: mod_base = OTHER; note = 2'-O-methyladenosine-3'-phosphate
  modified_base 6: mod_base = OTHER; note = 2'-fluoroadenosine-3'-phosphate
  modified_base 7: mod_base = OTHER; note = 2'-O-methyladenosine-3'-phosphate
  modified_base 8: mod_base = OTHER; note = 2'-fluoroguanosine-3'-phosphate
  modified_base 9: mod_base = OTHER; note = 2'-fluoroguanosine-3'-phosphate
  modified_base 10: mod_base = OTHER; note = 2'-O-methyluridine-3'-phosphate
  modified_base 11: mod_base = OTHER; note = 2'-O-methylguanosine-3'-phosphate
  modified_base 12: mod_base = OTHER; note = 2'-O-methylguanosine-3'-phosphate
  modified_base 13: mod_base = OTHER; note = 2'-O-methylguanosine-3'-phosphate
  modified_base 14: mod_base = OTHER; note = 2'-fluoroadenosine-3'-phosphate
  modified_base 15: mod_base = OTHER; note = 2'-O-methylguanosine-3'-phosphate
  modified_base 16: mod_base = OTHER; note = 2'-fluoroadenosine-3'-phosphate
  modified_base 17: mod_base = OTHER; note = 2'-O-methylcytidine-3'-phosphate
  modified_base 18: mod_base = OTHER; note = 2'-O-methyluridine-3'-phosphate
  modified_base 19: mod_base = OTHER; note = 2'-O-methylguanosine-3'-phosphate
  modified_base 20: mod_base = OTHER; note = 2'-O-methylguanosine-3'-phosphate
  modified_base 21: mod_base = OTHER; note = 2'-O-methylguanosine-3'-phosphorothioate
  modified_base 22: mod_base = OTHER; note = 2'-O-methylguanosine-3'-phosphorothioate
  modified_base 23: mod_base = OTHER; note = 2'-O-methylguanosine-3'-phosphate
aagaaaaggtgggagactggggg

SEQ ID NO: 3606 - DNA, 23 bp, synthetic construct
  source 1..23: mol_type = other DNA
  modified_base 1: mod_base = OTHER; note = 2'-O-methyladenosine-3'-phosphorothioate
  modified_base 2: mod_base = OTHER; note = 2'-deoxyadenosine-3'-phosphorothioate
  modified_base 3: mod_base = OTHER; note = 2'-O-methylguanosine-3'-phosphate
  modified_base 4: mod_base = OTHER; note = 2'-O-methyladenosine-3'-phosphate
  modified_base 6: mod_base = OTHER; note = 2'-O-methyladenosine-3'-phosphate
  modified_base 8: mod_base = OTHER; note = 2'-O-methylguanosine-3'-phosphate
  modified_base 9: mod_base = OTHER; note = 2'-O-methylguanosine-3'-phosphate
  modified_base 10: mod_base = OTHER; note = 2'-O-methyluridine-3'-phosphate
  modified_base 11: mod_base = OTHER; note = 2'-O-methylguanosine-3'-phosphate
  modified_base 13: mod_base = OTHER; note = 2'-O-methylguanosine-3'-phosphate
  modified_base 14: mod_base = OTHER; note = 2'-fluoroadenosine-3'-phosphate
  modified_base 15: mod_base = OTHER; note = 2'-O-methylguanosine-3'-phosphate
  modified_base 16: mod_base = OTHER; note = 2'-O-methyladenosine-3'-phosphate
  modified_base 17: mod_base = OTHER; note = 2'-O-methylcytidine-3'-phosphate
  modified_base 18: mod_base = OTHER; note = 2'-O-methyluridine-3'-phosphate
  modified_base 19: mod_base = OTHER; note = 2'-O-methylguanosine-3'-phosphate
  modified_base 20: mod_base = OTHER; note = 2'-O-methylguanosine-3'-phosphate
  modified_base 21: mod_base = OTHER; note = 2'-O-methylguanosine-3'-phosphorothioate
  modified_base 22: mod_base = OTHER; note = 2'-O-methylguanosine-3'-phosphorothioate
  modified_base 23: mod_base = OTHER; note = 2'-O-methylguanosine-3'-phosphate
  misc_feature 1: note = RNA
  misc_feature 2: note = DNA
  misc_feature 3..4: note = RNA
  misc_feature 5: note = DNA
  misc_feature 6: note = RNA
  misc_feature 7: note = DNA
  misc_feature 8..11: note = RNA
  misc_feature 12: note = DNA
  misc_feature 13..23: note = RNA
aagaaaaggtgggagactggggg

SEQ ID NO: 3607 - RNA, 23 nt, synthetic construct
  source 1..23: mol_type = other RNA
  modified_base 1: mod_base = OTHER; note = 2'-O-methyladenosine-3'-phosphorothioate
  modified_base 2: mod_base = OTHER; note = 2'-fluoroadenosine-3'-phosphorothioate
  modified_base 3: mod_base = OTHER; note = 2'-O-methyladenosine-3'-phosphate
  modified_base 4: mod_base = OTHER; note = 2'-O-methylguanosine-3'-phosphate
  modified_base 5: mod_base = OTHER; note = 2'-O-methyladenosine-3'-phosphate
  modified_base 6: mod_base = OTHER; note = 2'-fluoroadenosine-3'-phosphate
  modified_base 7: mod_base = OTHER; note = 2'-O-methyladenosine-3'-phosphate
  modified_base 8: mod_base = OTHER; note = 2'-fluoroadenosine-3'-phosphate
  modified_base 9: mod_base = OTHER; note = 2'-fluoroguanosine-3'-phosphate
  modified_base 10: mod_base = OTHER; note = 2'-O-methylguanosine-3'-phosphate
  modified_base 11: mod_base = OTHER; note = 2'-O-methyluridine-3'-phosphate
  modified_base 12: mod_base = OTHER; note = 2'-O-methylguanosine-3'-phosphate
  modified_base 13: mod_base = OTHER; note = 2'-O-methylguanosine-3'-phosphate
  modified_base 14: mod_base = OTHER; note = 2'-fluoroguanosine-3'-phosphate
  modified_base 15: mod_base = OTHER; note = 2'-O-methyladenosine-3'-phosphate
  modified_base 16: mod_base = OTHER; note = 2'-fluoroguanosine-3'-phosphate
  modified_base 17: mod_base = OTHER; note = 2'-O-methyladenosine-3'-phosphate
  modified_base 18: mod_base = OTHER; note = 2'-O-methylcytidine-3'-phosphate
  modified_base 19: mod_base = OTHER; note = 2'-O-methyluridine-3'-phosphate
  modified_base 20: mod_base = OTHER; note = 2'-O-methylguanosine-3'-phosphate
  modified_base 21: mod_base = OTHER; note = 2'-O-methylguanosine-3'-phosphorothioate
  modified_base 22: mod_base = OTHER; note = 2'-O-methylguanosine-3'-phosphorothioate
  modified_base 23: mod_base = OTHER; note = 2'-O-methylguanosine-3'-phosphate
aaagaaaaggtgggagactgggg

SEQ ID NO: 3608 - DNA, 23 bp, synthetic construct
  source 1..23: mol_type = other DNA
  modified_base 1: mod_base = OTHER; note = 2'-O-methyladenosine-3'-phosphorothioate
  modified_base 2: mod_base = OTHER; note = 2'-deoxyadenosine-3'-phosphorothioate
  modified_base 3: mod_base = OTHER; note = 2'-O-methyladenosine-3'-phosphate
  modified_base 4: mod_base = OTHER; note = 2'-O-methylguanosine-3'-phosphate
  modified_base 6: mod_base = OTHER; note = 2'-O-methyladenosine-3'-phosphate
  modified_base 8: mod_base = OTHER; note = 2'-O-methyladenosine-3'-phosphate
  modified_base 9: mod_base = OTHER; note = 2'-O-methylguanosine-3'-phosphate
  modified_base 10: mod_base = OTHER; note = 2'-O-methylguanosine-3'-phosphate
  modified_base 11: mod_base = OTHER; note = 2'-O-methyluridine-3'-phosphate
  modified_base 13: mod_base = OTHER; note = 2'-O-methylguanosine-3'-phosphate
  modified_base 14: mod_base = OTHER; note = 2'-fluoroguanosine-3'-phosphate
  modified_base 15: mod_base = OTHER; note = 2'-O-methyladenosine-3'-phosphate
  modified_base 16: mod_base = OTHER; note = 2'-O-methylguanosine-3'-phosphate
  modified_base 17: mod_base = OTHER; note = 2'-O-methyladenosine-3'-phosphate
  modified_base 18: mod_base = OTHER; note = 2'-O-methylcytidine-3'-phosphate
  modified_base 19: mod_base = OTHER; note = 2'-O-methyluridine-3'-phosphate
  modified_base 20: mod_base = OTHER; note = 2'-O-methylguanosine-3'-phosphate
  modified_base 21: mod_base = OTHER; note = 2'-O-methylguanosine-3'-phosphorothioate
  modified_base 22: mod_base = OTHER; note = 2'-O-methylguanosine-3'-phosphorothioate
  modified_base 23: mod_base = OTHER; note = 2'-O-methylguanosine-3'-phosphate
  misc_feature 1: note = RNA
  misc_feature 2: note = DNA
  misc_feature 3..4: note = RNA
  misc_feature 5: note = DNA
  misc_feature 6: note = RNA
  misc_feature 7: note = DNA
  misc_feature 8..11: note = RNA
  misc_feature 12: note = DNA
  misc_feature 13..23: note = RNA
aaagaaaaggtgggagactgggg

SEQ ID NO: 3609 - RNA, 23 nt, synthetic construct
  source 1..23: mol_type = other RNA
  modified_base 1: mod_base = OTHER; note = 2'-O-methyladenosine-3'-phosphorothioate
  modified_base 2: mod_base = OTHER; note = 2'-fluoroadenosine-3'-phosphorothioate
  modified_base 3: mod_base = OTHER; note = 2'-O-methylguanosine-3'-phosphate
  modified_base 4: mod_base = OTHER; note = 2'-O-methyladenosine-3'-phosphate
  modified_base 5: mod_base = OTHER; note = 2'-O-methyladenosine-3'-phosphate
  modified_base 6: mod_base = OTHER; note = 2'-fluoroguanosine-3'-phosphate
  modified_base 7: mod_base = OTHER; note = 2'-O-methyladenosine-3'-phosphate
  modified_base 8: mod_base = OTHER; note = 2'-fluoroadenosine-3'-phosphate
  modified_base 9: mod_base = OTHER; note = 2'-fluoroadenosine-3'-phosphate
  modified_base 10: mod_base = OTHER; note = 2'-O-methyladenosine-3'-phosphate
  modified_base 11: mod_base = OTHER; note = 2'-O-methylguanosine-3'-phosphate
  modified_base 12: mod_base = OTHER; note = 2'-O-methylguanosine-3'-phosphate
  modified_base 13: mod_base = OTHER; note = 2'-O-methyluridine-3'-phosphate
  modified_base 14: mod_base = OTHER; note = 2'-fluoroguanosine-3'-phosphate
  modified_base 15: mod_base = OTHER; note = 2'-O-methylguanosine-3'-phosphate
  modified_base 16: mod_base = OTHER; note = 2'-fluoroguanosine-3'-phosphate
  modified_base 17: mod_base = OTHER; note = 2'-O-methyladenosine-3'-phosphate
  modified_base 18: mod_base = OTHER; note = 2'-O-methylguanosine-3'-phosphate
  modified_base 19: mod_base = OTHER; note = 2'-O-methyladenosine-3'-phosphate
  modified_base 20: mod_base = OTHER; note = 2'-O-methylcytidine-3'-phosphate
  modified_base 21: mod_base = OTHER; note = 2'-O-methyluridine-3'-phosphorothioate
  modified_base 22: mod_base = OTHER; note = 2'-O-methylguanosine-3'-phosphorothioate
  modified_base 23: mod_base = OTHER; note = 2'-O-methylguanosine-3'-phosphate
aagaagaaaaggtgggagactgg

SEQ ID NO: 3610 - DNA, 23 bp, synthetic construct
  source 1..23: mol_type = other DNA
  modified_base 1: mod_base = OTHER; note = 2'-O-methyladenosine-3'-phosphorothioate
  modified_base 2: mod_base = OTHER; note = 2'-deoxyadenosine-3'-phosphorothioate
  modified_base 3: mod_base = OTHER; note = 2'-O-methylguanosine-3'-phosphate
  modified_base 4: mod_base = OTHER; note = 2'-O-methyladenosine-3'-phosphate
  modified_base 6: mod_base = OTHER; note = 2'-O-methylguanosine-3'-phosphate
  modified_base 8: mod_base = OTHER; note = 2'-O-methyladenosine-3'-phosphate
  modified_base 9: mod_base = OTHER; note = 2'-O-methyladenosine-3'-phosphate
  modified_base 10: mod_base = OTHER; note = 2'-O-methyladenosine-3'-phosphate
  modified_base 11: mod_base = OTHER; note = 2'-O-methylguanosine-3'-phosphate
  modified_base 13: mod_base = OTHER; note = 2'-O-methyluridine-3'-phosphate
  modified_base 14: mod_base = OTHER; note = 2'-fluoroguanosine-3'-phosphate
  modified_base 15: mod_base = OTHER; note = 2'-O-methylguanosine-3'-phosphate
  modified_base 16: mod_base = OTHER; note = 2'-O-methylguanosine-3'-phosphate
  modified_base 17: mod_base = OTHER; note = 2'-O-methyladenosine-3'-phosphate
  modified_base 18: mod_base = OTHER; note = 2'-O-methylguanosine-3'-phosphate
  modified_base 19: mod_base = OTHER; note = 2'-O-methyladenosine-3'-phosphate
  modified_base 20: mod_base = OTHER; note = 2'-O-methylcytidine-3'-phosphate
  modified_base 21: mod_base = OTHER; note = 2'-O-methyluridine-3'-phosphorothioate
  modified_base 22: mod_base = OTHER; note = 2'-O-methylguanosine-3'-phosphorothioate
  modified_base 23: mod_base = OTHER; note = 2'-O-methylguanosine-3'-phosphate
  misc_feature 1: note = RNA
  misc_feature 2: note = DNA
  misc_feature 3..4: note = RNA
  misc_feature 5: note = DNA
  misc_feature 6: note = RNA
  misc_feature 7: note = DNA
  misc_feature 8..11: note = RNA
  misc_feature 12: note = DNA
  misc_feature 13..23: note = RNA
aagaagaaaaggtgggagactgg

SEQ ID NO: 3611 - RNA, 23 nt, synthetic construct
  source 1..23: mol_type = other RNA
  modified_base 1: mod_base = OTHER; note = 2'-O-methyladenosine-3'-phosphorothioate
  modified_base 2: mod_base = OTHER; note = 2'-fluorocytidine-3'-phosphorothioate
  modified_base 3: mod_base = OTHER; note = 2'-O-methylcytidine-3'-phosphate
  modified_base 4: mod_base = OTHER; note = 2'-O-methylcytidine-3'-phosphate
  modified_base 5: mod_base = OTHER; note = 2'-O-methyladenosine-3'-phosphate
  modified_base 6: mod_base = OTHER; note = 2'-fluorouridine-3'-phosphate
  modified_base 7: mod_base = OTHER; note = 2'-O-methyluridine-3'-phosphate
  modified_base 8: mod_base = OTHER; note = 2'-fluorocytidine-3'-phosphate
  modified_base 9: mod_base = OTHER; note = 2'-fluorouridine-3'-phosphate
  modified_base 10: mod_base = OTHER; note = 2'-O-methylcytidine-3'-phosphate
  modified_base 11: mod_base = OTHER; note = 2'-O-methyluridine-3'-phosphate
  modified_base 12: mod_base = OTHER; note = 2'-O-methyladenosine-3'-phosphate
  modified_base 13: mod_base = OTHER; note = 2'-O-methyladenosine-3'-phosphate
  modified_base 14: mod_base = OTHER; note = 2'-fluoroadenosine-3'-phosphate
  modified_base 15: mod_base = OTHER; note = 2'-O-methyladenosine-3'-phosphate
  modified_base 16: mod_base = OTHER; note = 2'-fluorouridine-3'-phosphate
  modified_base 17: mod_base = OTHER; note = 2'-O-methyladenosine-3'-phosphate
  modified_base 18: mod_base = OTHER; note = 2'-O-methyladenosine-3'-phosphate
  modified_base 19: mod_base = OTHER; note = 2'-O-methyladenosine-3'-phosphate
  modified_base 20: mod_base = OTHER; note = 2'-O-methylcytidine-3'-phosphate
  modified_base 21: mod_base = OTHER; note = 2'-O-methylcytidine-3'-phosphorothioate
  modified_base 22: mod_base = OTHER; note = 2'-O-methylcytidine-3'-phosphorothioate
  modified_base 23: mod_base = OTHER; note = 2'-O-methyladenosine-3'-phosphate
acccattctctaaaataaaccca

SEQ ID NO: 3612 - DNA, 23 bp, synthetic construct
  source 1..23: mol_type = other DNA
  modified_base 1: mod_base = OTHER; note = 2'-O-methyladenosine-3'-phosphorothioate
  modified_base 2: mod_base = OTHER; note = 2'-deoxycytidine-3'-phosphorothioate
  modified_base 3: mod_base = OTHER; note = 2'-O-methylcytidine-3'-phosphate
  modified_base 4: mod_base = OTHER; note = 2'-O-methylcytidine-3'-phosphate
  modified_base 6: mod_base = OTHER; note = 2'-O-methyluridine-3'-phosphate
  modified_base 8: mod_base = OTHER; note = 2'-O-methylcytidine-3'-phosphate
  modified_base 9: mod_base = OTHER; note = 2'-O-methyluridine-3'-phosphate
  modified_base 10: mod_base = OTHER; note = 2'-O-methylcytidine-3'-phosphate
  modified_base 11: mod_base = OTHER; note = 2'-O-methyluridine-3'-phosphate
  modified_base 13: mod_base = OTHER; note = 2'-O-methyladenosine-3'-phosphate
  modified_base 14: mod_base = OTHER; note = 2'-fluoroadenosine-3'-phosphate
  modified_base 15: mod_base = OTHER; note = 2'-O-methyladenosine-3'-phosphate
  modified_base 16: mod_base = OTHER; note = 2'-O-methyluridine-3'-phosphate
  modified_base 17: mod_base = OTHER; note = 2'-O-methyladenosine-3'-phosphate
  modified_base 18: mod_base = OTHER; note = 2'-O-methyladenosine-3'-phosphate
  modified_base 19: mod_base = OTHER; note = 2'-O-methyladenosine-3'-phosphate
  modified_base 20: mod_base = OTHER; note = 2'-O-methylcytidine-3'-phosphate
  modified_base 21: mod_base = OTHER; note = 2'-O-methylcytidine-3'-phosphorothioate
  modified_base 22: mod_base = OTHER; note = 2'-O-methylcytidine-3'-phosphorothioate
  modified_base 23: mod_base = OTHER; note = 2'-O-methyladenosine-3'-phosphate
  misc_feature 1: note = RNA
  misc_feature 2: note = DNA
  misc_feature 3..4: note = RNA
  misc_feature 5: note = DNA
  misc_feature 6: note = RNA
  misc_feature 7: note = DNA
  misc_feature 8..11: note = RNA
  misc_feature 12: note = DNA
  misc_feature 13..23: note = RNA
acccattctctaaaataaaccca

SEQ ID NO: 3613 - RNA, 23 nt, synthetic construct
  source 1..23: mol_type = other RNA
  modified_base 1: mod_base = OTHER; note = 2'-O-methyladenosine-3'-phosphorothioate
  modified_base 2: mod_base = OTHER; note = 2'-fluorocytidine-3'-phosphorothioate
  modified_base 3: mod_base = OTHER; note = 2'-O-methylcytidine-3'-phosphate
  modified_base 4: mod_base = OTHER; note = 2'-O-methylcytidine-3'-phosphate
  modified_base 5: mod_base = OTHER; note = 2'-O-methylcytidine-3'-phosphate
  modified_base 6: mod_base = OTHER; note = 2'-fluoroadenosine-3'-phosphate
  modified_base 7: mod_base = OTHER; note = 2'-O-methyluridine-3'-phosphate
  modified_base 8: mod_base = OTHER; note = 2'-fluorouridine-3'-phosphate
  modified_base 9: mod_base = OTHER; note = 2'-fluorocytidine-3'-phosphate
  modified_base 10: mod_base = OTHER; note = 2'-O-methyluridine-3'-phosphate
  modified_base 11: mod_base = OTHER; note = 2'-O-methylcytidine-3'-phosphate
  modified_base 12: mod_base = OTHER; note = 2'-O-methyluridine-3'-phosphate
  modified_base 13: mod_base = OTHER; note = 2'-O-methyladenosine-3'-phosphate
  modified_base 14: mod_base = OTHER; note = 2'-fluoroadenosine-3'-phosphate
  modified_base 15: mod_base = OTHER; note = 2'-O-methyladenosine-3'-phosphate
  modified_base 16: mod_base = OTHER; note = 2'-fluoroadenosine-3'-phosphate
  modified_base 17: mod_base = OTHER; note = 2'-O-methyluridine-3'-phosphate
  modified_base 18: mod_base = OTHER; note = 2'-O-methyladenosine-3'-phosphate
  modified_base 19: mod_base = OTHER; note = 2'-O-methyladenosine-3'-phosphate
  modified_base 20: mod_base = OTHER; note = 2'-O-methyladenosine-3'-phosphate
  modified_base 21: mod_base = OTHER; note = 2'-O-methylcytidine-3'-phosphorothioate
  modified_base 22: mod_base = OTHER; note = 2'-O-methylcytidine-3'-phosphorothioate
  modified_base 23: mod_base = OTHER; note = 2'-O-methylcytidine-3'-phosphate
accccattctctaaaataaaccc

SEQ ID NO: 3614 - DNA, 23 bp, synthetic construct
  source 1..23: mol_type = other DNA
  modified_base 1: mod_base = OTHER; note = 2'-O-methyladenosine-3'-phosphorothioate
  modified_base 2: mod_base = OTHER; note = 2'-deoxycytidine-3'-phosphorothioate
  modified_base 3: mod_base = OTHER; note = 2'-O-methylcytidine-3'-phosphate
  modified_base 4: mod_base = OTHER; note = 2'-O-methylcytidine-3'-phosphate
  modified_base 6: mod_base = OTHER; note = 2'-O-methyladenosine-3'-phosphate
  modified_base 8: mod_base = OTHER; note = 2'-O-methyluridine-3'-phosphate
  modified_base 9: mod_base = OTHER; note = 2'-O-methylcytidine-3'-phosphate
  modified_base 10: mod_base = OTHER; note = 2'-O-methyluridine-3'-phosphate
  modified_base 11: mod_base = OTHER; note = 2'-O-methylcytidine-3'-phosphate
  modified_base 13: mod_base = OTHER; note = 2'-O-methyladenosine-3'-phosphate
  modified_base 14: mod_base = OTHER; note = 2'-fluoroadenosine-3'-phosphate
  modified_base 15: mod_base = OTHER; note = 2'-O-methyladenosine-3'-phosphate
  modified_base 16: mod_base = OTHER; note = 2'-O-methyladenosine-3'-phosphate
  modified_base 17: mod_base = OTHER; note = 2'-O-methyluridine-3'-phosphate
  modified_base 18: mod_base = OTHER; note = 2'-O-methyladenosine-3'-phosphate
  modified_base 19: mod_base = OTHER; note = 2'-O-methyladenosine-3'-phosphate
  modified_base 20: mod_base = OTHER; note = 2'-O-methyladenosine-3'-phosphate
  modified_base 21: mod_base = OTHER; note = 2'-O-methylcytidine-3'-phosphorothioate
  modified_base 22: mod_base = OTHER; note = 2'-O-methylcytidine-3'-phosphorothioate
  modified_base 23: mod_base = OTHER; note = 2'-O-methylcytidine-3'-phosphate
  misc_feature 1: note = RNA
  misc_feature 2: note = DNA
  misc_feature 3..4: note = RNA
  misc_feature 5: note = DNA
  misc_feature 6: note = RNA
  misc_feature 7: note = DNA
  misc_feature 8..11: note = RNA
  misc_feature 12: note = DNA
  misc_feature 13..23: note = RNA
accccattctctaaaataaaccc

SEQ ID NO: 3615 - RNA, 23 nt, synthetic construct
  source 1..23: mol_type = other RNA
  modified_base 1: mod_base = OTHER; note = 2'-O-methyladenosine-3'-phosphorothioate
  modified_base 2: mod_base = OTHER; note = 2'-fluorocytidine-3'-phosphorothioate
  modified_base 3: mod_base = OTHER; note = 2'-O-methylcytidine-3'-phosphate
  modified_base 4: mod_base = OTHER; note = 2'-O-methylcytidine-3'-phosphate
  modified_base 5: mod_base = OTHER; note = 2'-O-methylcytidine-3'-phosphate
  modified_base 6: mod_base = OTHER; note = 2'-fluorocytidine-3'-phosphate
  modified_base 7: mod_base = OTHER; note = 2'-O-methyladenosine-3'-phosphate
  modified_base 8: mod_base = OTHER; note = 2'-fluorouridine-3'-phosphate
  modified_base 9: mod_base = OTHER; note = 2'-fluorouridine-3'-phosphate
  modified_base 10: mod_base = OTHER; note = 2'-O-methylcytidine-3'-phosphate
  modified_base 11: mod_base = OTHER; note = 2'-O-methyluridine-3'-phosphate
  modified_base 12: mod_base = OTHER; note = 2'-O-methylcytidine-3'-phosphate
  modified_base 13: mod_base = OTHER; note = 2'-O-methyluridine-3'-phosphate
  modified_base 14: mod_base = OTHER; note = 2'-fluoroadenosine-3'-phosphate
  modified_base 15: mod_base = OTHER; note = 2'-O-methyladenosine-3'-phosphate
  modified_base 16: mod_base = OTHER; note = 2'-fluoroadenosine-3'-phosphate
  modified_base 17: mod_base = OTHER; note = 2'-O-methyladenosine-3'-phosphate
  modified_base 18: mod_base = OTHER; note = 2'-O-methyluridine-3'-phosphate
  modified_base 19: mod_base = OTHER; note = 2'-O-methyladenosine-3'-phosphate
  modified_base 20: mod_base = OTHER; note = 2'-O-methyladenosine-3'-phosphate
  modified_base 21: mod_base = OTHER; note = 2'-O-methyladenosine-3'-phosphorothioate
  modified_base 22: mod_base = OTHER; note = 2'-O-methylcytidine-3'-phosphorothioate
  modified_base 23: mod_base = OTHER; note = 2'-O-methylcytidine-3'-phosphate
acccccattctctaaaataaacc

SEQ ID NO: 3616 - DNA, 23 bp, synthetic construct
  source 1..23: mol_type = other DNA
  modified_base 1: mod_base = OTHER; note = 2'-O-methyladenosine-3'-phosphorothioate
  modified_base 2: mod_base = OTHER; note = 2'-deoxycytidine-3'-phosphorothioate
  modified_base 3: mod_base = OTHER; note = 2'-O-methylcytidine-3'-phosphate
  modified_base 4: mod_base = OTHER; note = 2'-O-methylcytidine-3'-phosphate
  modified_base 6: mod_base = OTHER; note = 2'-O-methylcytidine-3'-phosphate
  modified_base 8: mod_base = OTHER; note = 2'-O-methyluridine-3'-phosphate
  modified_base 9: mod_base = OTHER; note = 2'-O-methyluridine-3'-phosphate
  modified_base 10: mod_base = OTHER; note = 2'-O-methylcytidine-3'-phosphate
  modified_base 11: mod_base = OTHER; note = 2'-O-methyluridine-3'-phosphate
  modified_base 13: mod_base = OTHER; note = 2'-O-methyluridine-3'-phosphate
  modified_base 14: mod_base = OTHER; note = 2'-fluoroadenosine-3'-phosphate
  modified_base 15: mod_base = OTHER; note = 2'-O-methyladenosine-3'-phosphate
  modified_base 16: mod_base = OTHER; note = 2'-O-methyladenosine-3'-phosphate
  modified_base 17: mod_base = OTHER; note = 2'-O-methyladenosine-3'-phosphate
  modified_base 18: mod_base = OTHER; note = 2'-O-methyluridine-3'-phosphate
  modified_base 19: mod_base = OTHER; note = 2'-O-methyladenosine-3'-phosphate
  modified_base 20: mod_base = OTHER; note = 2'-O-methyladenosine-3'-phosphate
  modified_base 21: mod_base = OTHER; note = 2'-O-methyladenosine-3'-phosphorothioate
  modified_base 22: mod_base = OTHER; note = 2'-O-methylcytidine-3'-phosphorothioate
  modified_base 23: mod_base = OTHER; note = 2'-O-methylcytidine-3'-phosphate
  misc_feature 1: note = RNA
  misc_feature 2: note = DNA
  misc_feature 3..4: note = RNA
  misc_feature 5: note = DNA
  misc_feature 6: note = RNA
  misc_feature 7: note = DNA
  misc_feature 8..11: note = RNA
  misc_feature 12: note = DNA
  misc_feature 13..23: note = RNA
acccccattctctaaaataaacc

SEQ ID NO: 3617 - RNA, 23 nt, synthetic construct
  source 1..23: mol_type = other RNA
  modified_base 1: mod_base = OTHER; note = 2'-O-methyladenosine-3'-phosphorothioate
  modified_base 2: mod_base = OTHER; note = 2'-fluorouridine -3'-phosphorothioate
  modified_base 3: mod_base = OTHER; note = 2'-O-methylguanosine-3'-phosphate
  modified_base 4: mod_base = OTHER; note = 2'-O-methylcytidine-3'-phosphate
  modified_base 5: mod_base = OTHER; note = 2'-O-methylcytidine-3'-phosphate
  modified_base 6: mod_base = OTHER; note = 2'-fluorouridine-3'-phosphate
  modified_base 7: mod_base = OTHER; note = 2'-O-methylcytidine-3'-phosphate
  modified_base 8: mod_base = OTHER; note = 2'-fluorocytidine-3'-phosphate
  modified_base 9: mod_base = OTHER; note = 2'-fluorocytidine-3'-phosphate
  modified_base 10: mod_base = OTHER; note = 2'-O-methylcytidine-3'-phosphate
  modified_base 11: mod_base = OTHER; note = 2'-O-methyladenosine-3'-phosphate
  modified_base 12: mod_base = OTHER; note = 2'-O-methylcytidine-3'-phosphate
  modified_base 13: mod_base = OTHER; note = 2'-O-methylcytidine-3'-phosphate
  modified_base 14: mod_base = OTHER; note = 2'-fluorocytidine-3'-phosphate
  modified_base 15: mod_base = OTHER; note = 2'-O-methylcytidine-3'-phosphate
  modified_base 16: mod_base = OTHER; note = 2'-fluorocytidine-3'-phosphate
  modified_base 17: mod_base = OTHER; note = 2'-O-methyladenosine-3'-phosphate
  modified_base 18: mod_base = OTHER; note = 2'-O-methyluridine-3'-phosphate
  modified_base 19: mod_base = OTHER; note = 2'-O-methyluridine-3'-phosphate
  modified_base 20: mod_base = OTHER; note = 2'-O-methylcytidine-3'-phosphate
  modified_base 21: mod_base = OTHER; note = 2'-O-methyluridine-3'-phosphorothioate
  modified_base 22: mod_base = OTHER; note = 2'-O-methylcytidine-3'-phosphorothioate
  modified_base 23: mod_base = OTHER; note = 2'-O-methyluridine-3'-phosphate
atgcctccccacccccattctct

SEQ ID NO: 3618 - DNA, 23 bp, synthetic construct
  source 1..23: mol_type = other DNA
  modified_base 1: mod_base = OTHER; note = 2'-O-methyladenosine-3'-phosphorothioate
  modified_base 2: mod_base = OTHER; note = 2'-deoxythimidine-3'-phosphorothioate
  modified_base 3: mod_base = OTHER; note = 2'-O-methylguanosine-3'-phosphate
  modified_base 4: mod_base = OTHER; note = 2'-O-methylcytidine-3'-phosphate
  modified_base 6: mod_base = OTHER; note = 2'-O-methyluridine-3'-phosphate
  modified_base 8: mod_base = OTHER; note = 2'-O-methylcytidine-3'-phosphate
  modified_base 9: mod_base = OTHER; note = 2'-O-methylcytidine-3'-phosphate
  modified_base 10: mod_base = OTHER; note = 2'-O-methylcytidine-3'-phosphate
  modified_base 11: mod_base = OTHER; note = 2'-O-methyladenosine-3'-phosphate
  modified_base 13: mod_base = OTHER; note = 2'-O-methylcytidine-3'-phosphate
  modified_base 14: mod_base = OTHER; note = 2'-fluorocytidine-3'-phosphate
  modified_base 15: mod_base = OTHER; note = 2'-O-methylcytidine-3'-phosphate
  modified_base 16: mod_base = OTHER; note = 2'-O-methylcytidine-3'-phosphate
  modified_base 17: mod_base = OTHER; note = 2'-O-methyladenosine-3'-phosphate
  modified_base 18: mod_base = OTHER; note = 2'-O-methyluridine-3'-phosphate
  modified_base 19: mod_base = OTHER; note = 2'-O-methyluridine-3'-phosphate
  modified_base 20: mod_base = OTHER; note = 2'-O-methylcytidine-3'-phosphate
  modified_base 21: mod_base = OTHER; note = 2'-O-methyluridine-3'-phosphorothioate
  modified_base 22: mod_base = OTHER; note = 2'-O-methylcytidine-3'-phosphorothioate
  modified_base 23: mod_base = OTHER; note = 2'-O-methyluridine-3'-phosphate
  misc_feature 1: note = RNA
  misc_feature 2: note = DNA
  misc_feature 3..4: note = RNA
  misc_feature 5: note = DNA
  misc_feature 6: note = RNA
  misc_feature 7: note = DNA
  misc_feature 8..11: note = RNA
  misc_feature 12: note = DNA
  misc_feature 13..23: note = RNA
atgcctccccacccccattctct

SEQ ID NO: 3619 - RNA, 23 nt, synthetic construct
  source 1..23: mol_type = other RNA
  modified_base 1: mod_base = OTHER; note = 2'-O-methyladenosine-3'-phosphorothioate
  modified_base 2: mod_base = OTHER; note = 2'-fluorouridine -3'-phosphorothioate
  modified_base 3: mod_base = OTHER; note = 2'-O-methyluridine-3'-phosphate
  modified_base 4: mod_base = OTHER; note = 2'-O-methylguanosine-3'-phosphate
  modified_base 5: mod_base = OTHER; note = 2'-O-methylcytidine-3'-phosphate
  modified_base 6: mod_base = OTHER; note = 2'-fluorocytidine-3'-phosphate
  modified_base 7: mod_base = OTHER; note = 2'-O-methyluridine-3'-phosphate
  modified_base 8: mod_base = OTHER; note = 2'-fluorocytidine-3'-phosphate
  modified_base 9: mod_base = OTHER; note = 2'-fluorocytidine-3'-phosphate
  modified_base 10: mod_base = OTHER; note = 2'-O-methylcytidine-3'-phosphate
  modified_base 11: mod_base = OTHER; note = 2'-O-methylcytidine-3'-phosphate
  modified_base 12: mod_base = OTHER; note = 2'-O-methyladenosine-3'-phosphate
  modified_base 13: mod_base = OTHER; note = 2'-O-methylcytidine-3'-phosphate
  modified_base 14: mod_base = OTHER; note = 2'-fluorocytidine-3'-phosphate
  modified_base 15: mod_base = OTHER; note = 2'-O-methylcytidine-3'-phosphate
  modified_base 16: mod_base = OTHER; note = 2'-fluorocytidine-3'-phosphate
  modified_base 17: mod_base = OTHER; note = 2'-O-methylcytidine-3'-phosphate
  modified_base 18: mod_base = OTHER; note = 2'-O-methyladenosine-3'-phosphate
  modified_base 19: mod_base = OTHER; note = 2'-O-methyluridine-3'-phosphate
  modified_base 20: mod_base = OTHER; note = 2'-O-methyluridine-3'-phosphate
  modified_base 21: mod_base = OTHER; note = 2'-O-methylcytidine-3'-phosphorothioate
  modified_base 22: mod_base = OTHER; note = 2'-O-methyluridine-3'-phosphorothioate
  modified_base 23: mod_base = OTHER; note = 2'-O-methylcytidine-3'-phosphate
attgcctccccacccccattctc

SEQ ID NO: 3620 - DNA, 23 bp, synthetic construct
  source 1..23: mol_type = other DNA
  modified_base 1: mod_base = OTHER; note = 2'-O-methyladenosine-3'-phosphorothioate
  modified_base 2: mod_base = OTHER; note = 2'-deoxythimidine-3'-phosphorothioate
  modified_base 3: mod_base = OTHER; note = 2'-O-methyluridine-3'-phosphate
  modified_base 4: mod_base = OTHER; note = 2'-O-methylguanosine-3'-phosphate
  modified_base 6: mod_base = OTHER; note = 2'-O-methylcytidine-3'-phosphate
  modified_base 8: mod_base = OTHER; note = 2'-O-methylcytidine-3'-phosphate
  modified_base 9: mod_base = OTHER; note = 2'-O-methylcytidine-3'-phosphate
  modified_base 10: mod_base = OTHER; note = 2'-O-methylcytidine-3'-phosphate
  modified_base 11: mod_base = OTHER; note = 2'-O-methylcytidine-3'-phosphate
  modified_base 13: mod_base = OTHER; note = 2'-O-methylcytidine-3'-phosphate
  modified_base 14: mod_base = OTHER; note = 2'-fluorocytidine-3'-phosphate
  modified_base 15: mod_base = OTHER; note = 2'-O-methylcytidine-3'-phosphate
  modified_base 16: mod_base = OTHER; note = 2'-O-methylcytidine-3'-phosphate
  modified_base 17: mod_base = OTHER; note = 2'-O-methylcytidine-3'-phosphate
  modified_base 18: mod_base = OTHER; note = 2'-O-methyladenosine-3'-phosphate
  modified_base 19: mod_base = OTHER; note = 2'-O-methyluridine-3'-phosphate
  modified_base 20: mod_base = OTHER; note = 2'-O-methyluridine-3'-phosphate
  modified_base 21: mod_base = OTHER; note = 2'-O-methylcytidine-3'-phosphorothioate
  modified_base 22: mod_base = OTHER; note = 2'-O-methyluridine-3'-phosphorothioate
  modified_base 23: mod_base = OTHER; note = 2'-O-methylcytidine-3'-phosphate
  misc_feature 1: note = RNA
  misc_feature 2: note = DNA
  misc_feature 3..4: note = RNA
  misc_feature 5: note = DNA
  misc_feature 6: note = RNA
  misc_feature 7: note = DNA
  misc_feature 8..11: note = RNA
  misc_feature 12: note = DNA
  misc_feature 13..23: note = RNA
attgcctccccacccccattctc

SEQ ID NO: 3621 - RNA, 23 nt, synthetic construct
  source 1..23: mol_type = other RNA
  modified_base 1: mod_base = OTHER; note = 2'-O-methyladenosine-3'-phosphorothioate
  modified_base 2: mod_base = OTHER; note = 2'-fluorocytidine-3'-phosphorothioate
  modified_base 3: mod_base = OTHER; note = 2'-O-methyluridine-3'-phosphate
  modified_base 4: mod_base = OTHER; note = 2'-O-methyluridine-3'-phosphate
  modified_base 5: mod_base = OTHER; note = 2'-O-methylguanosine-3'-phosphate
  modified_base 6: mod_base = OTHER; note = 2'-fluorocytidine-3'-phosphate
  modified_base 7: mod_base = OTHER; note = 2'-O-methylcytidine-3'-phosphate
  modified_base 8: mod_base = OTHER; note = 2'-fluorouridine-3'-phosphate
  modified_base 9: mod_base = OTHER; note = 2'-fluorocytidine-3'-phosphate
  modified_base 10: mod_base = OTHER; note = 2'-O-methylcytidine-3'-phosphate
  modified_base 11: mod_base = OTHER; note = 2'-O-methylcytidine-3'-phosphate
  modified_base 12: mod_base = OTHER; note = 2'-O-methylcytidine-3'-phosphate
  modified_base 13: mod_base = OTHER; note = 2'-O-methyladenosine-3'-phosphate
  modified_base 14: mod_base = OTHER; note = 2'-fluorocytidine-3'-phosphate
  modified_base 15: mod_base = OTHER; note = 2'-O-methylcytidine-3'-phosphate
  modified_base 16: mod_base = OTHER; note = 2'-fluorocytidine-3'-phosphate
  modified_base 17: mod_base = OTHER; note = 2'-O-methylcytidine-3'-phosphate
  modified_base 18: mod_base = OTHER; note = 2'-O-methylcytidine-3'-phosphate
  modified_base 19: mod_base = OTHER; note = 2'-O-methyladenosine-3'-phosphate
  modified_base 20: mod_base = OTHER; note = 2'-O-methyluridine-3'-phosphate
  modified_base 21: mod_base = OTHER; note = 2'-O-methyluridine-3'-phosphorothioate
  modified_base 22: mod_base = OTHER; note = 2'-O-methylcytidine-3'-phosphorothioate
  modified_base 23: mod_base = OTHER; note = 2'-O-methyluridine-3'-phosphate
acttgcctccccacccccattct

SEQ ID NO: 3622 - DNA, 23 bp, synthetic construct
  source 1..23: mol_type = other DNA
  modified_base 1: mod_base = OTHER; note = 2'-O-methyladenosine-3'-phosphorothioate
  modified_base 2: mod_base = OTHER; note = 2'-deoxycytidine-3'-phosphorothioate
  modified_base 3: mod_base = OTHER; note = 2'-O-methyluridine-3'-phosphate
  modified_base 4: mod_base = OTHER; note = 2'-O-methyluridine-3'-phosphate
  modified_base 6: mod_base = OTHER; note = 2'-O-methylcytidine-3'-phosphate
  modified_base 8: mod_base = OTHER; note = 2'-O-methyluridine-3'-phosphate
  modified_base 9: mod_base = OTHER; note = 2'-O-methylcytidine-3'-phosphate
  modified_base 10: mod_base = OTHER; note = 2'-O-methylcytidine-3'-phosphate
  modified_base 11: mod_base = OTHER; note = 2'-O-methylcytidine-3'-phosphate
  modified_base 13: mod_base = OTHER; note = 2'-O-methyladenosine-3'-phosphate
  modified_base 14: mod_base = OTHER; note = 2'-fluorocytidine-3'-phosphate
  modified_base 15: mod_base = OTHER; note = 2'-O-methylcytidine-3'-phosphate
  modified_base 16: mod_base = OTHER; note = 2'-O-methylcytidine-3'-phosphate
  modified_base 17: mod_base = OTHER; note = 2'-O-methylcytidine-3'-phosphate
  modified_base 18: mod_base = OTHER; note = 2'-O-methylcytidine-3'-phosphate
  modified_base 19: mod_base = OTHER; note = 2'-O-methyladenosine-3'-phosphate
  modified_base 20: mod_base = OTHER; note = 2'-O-methyluridine-3'-phosphate
  modified_base 21: mod_base = OTHER; note = 2'-O-methyluridine-3'-phosphorothioate
  modified_base 22: mod_base = OTHER; note = 2'-O-methylcytidine-3'-phosphorothioate
  modified_base 23: mod_base = OTHER; note = 2'-O-methyluridine-3'-phosphate
  misc_feature 1: note = RNA
  misc_feature 2: note = DNA
  misc_feature 3..4: note = RNA
  misc_feature 5: note = DNA
  misc_feature 6: note = RNA
  misc_feature 7: note = DNA
  misc_feature 8..11: note = RNA
  misc_feature 12: note = DNA
  misc_feature 13..23: note = RNA
acttgcctccccacccccattct

SEQ ID NO: 3623 - RNA, 23 nt, synthetic construct
  source 1..23: mol_type = other RNA
  modified_base 1: mod_base = OTHER; note = 2'-O-methyladenosine-3'-phosphorothioate
  modified_base 2: mod_base = OTHER; note = 2'-fluorouridine -3'-phosphorothioate
  modified_base 3: mod_base = OTHER; note = 2'-O-methylcytidine-3'-phosphate
  modified_base 4: mod_base = OTHER; note = 2'-O-methyluridine-3'-phosphate
  modified_base 5: mod_base = OTHER; note = 2'-O-methyluridine-3'-phosphate
  modified_base 6: mod_base = OTHER; note = 2'-fluoroguanosine-3'-phosphate
  modified_base 7: mod_base = OTHER; note = 2'-O-methylcytidine-3'-phosphate
  modified_base 8: mod_base = OTHER; note = 2'-fluorocytidine-3'-phosphate
  modified_base 9: mod_base = OTHER; note = 2'-fluorouridine-3'-phosphate
  modified_base 10: mod_base = OTHER; note = 2'-O-methylcytidine-3'-phosphate
  modified_base 11: mod_base = OTHER; note = 2'-O-methylcytidine-3'-phosphate
  modified_base 12: mod_base = OTHER; note = 2'-O-methylcytidine-3'-phosphate
  modified_base 13: mod_base = OTHER; note = 2'-O-methylcytidine-3'-phosphate
  modified_base 14: mod_base = OTHER; note = 2'-fluoroadenosine-3'-phosphate
  modified_base 15: mod_base = OTHER; note = 2'-O-methylcytidine-3'-phosphate
  modified_base 16: mod_base = OTHER; note = 2'-fluorocytidine-3'-phosphate
  modified_base 17: mod_base = OTHER; note = 2'-O-methylcytidine-3'-phosphate
  modified_base 18: mod_base = OTHER; note = 2'-O-methylcytidine-3'-phosphate
  modified_base 19: mod_base = OTHER; note = 2'-O-methylcytidine-3'-phosphate
  modified_base 20: mod_base = OTHER; note = 2'-O-methyladenosine-3'-phosphate
  modified_base 21: mod_base = OTHER; note = 2'-O-methyluridine-3'-phosphorothioate
  modified_base 22: mod_base = OTHER; note = 2'-O-methyluridine-3'-phosphorothioate
  modified_base 23: mod_base = OTHER; note = 2'-O-methylcytidine-3'-phosphate
atcttgcctccccacccccattc

SEQ ID NO: 3624 - DNA, 23 bp, synthetic construct
  source 1..23: mol_type = other DNA
  modified_base 1: mod_base = OTHER; note = 2'-O-methyladenosine-3'-phosphorothioate
  modified_base 2: mod_base = OTHER; note = 2'-deoxythimidine-3'-phosphorothioate
  modified_base 3: mod_base = OTHER; note = 2'-O-methylcytidine-3'-phosphate
  modified_base 4: mod_base = OTHER; note = 2'-O-methyluridine-3'-phosphate
  modified_base 6: mod_base = OTHER; note = 2'-O-methylguanosine-3'-phosphate
  modified_base 8: mod_base = OTHER; note = 2'-O-methylcytidine-3'-phosphate
  modified_base 9: mod_base = OTHER; note = 2'-O-methyluridine-3'-phosphate
  modified_base 10: mod_base = OTHER; note = 2'-O-methylcytidine-3'-phosphate
  modified_base 11: mod_base = OTHER; note = 2'-O-methylcytidine-3'-phosphate
  modified_base 13: mod_base = OTHER; note = 2'-O-methylcytidine-3'-phosphate
  modified_base 14: mod_base = OTHER; note = 2'-fluoroadenosine-3'-phosphate
  modified_base 15: mod_base = OTHER; note = 2'-O-methylcytidine-3'-phosphate
  modified_base 16: mod_base = OTHER; note = 2'-O-methylcytidine-3'-phosphate
  modified_base 17: mod_base = OTHER; note = 2'-O-methylcytidine-3'-phosphate
  modified_base 18: mod_base = OTHER; note = 2'-O-methylcytidine-3'-phosphate
  modified_base 19: mod_base = OTHER; note = 2'-O-methylcytidine-3'-phosphate
  modified_base 20: mod_base = OTHER; note = 2'-O-methyladenosine-3'-phosphate
  modified_base 21: mod_base = OTHER; note = 2'-O-methyluridine-3'-phosphorothioate
  modified_base 22: mod_base = OTHER; note = 2'-O-methyluridine-3'-phosphorothioate
  modified_base 23: mod_base = OTHER; note = 2'-O-methylcytidine-3'-phosphate
  misc_feature 1: note = RNA
  misc_feature 2: note = DNA
  misc_feature 3..4: note = RNA
  misc_feature 5: note = DNA
  misc_feature 6: note = RNA
  misc_feature 7: note = DNA
  misc_feature 8..11: note = RNA
  misc_feature 12: note = DNA
  misc_feature 13..23: note = RNA
atcttgcctccccacccccattc

SEQ ID NO: 3625 - RNA, 23 nt, synthetic construct
  source 1..23: mol_type = other RNA
  modified_base 1: mod_base = OTHER; note = 2'-O-methyladenosine-3'-phosphorothioate
  modified_base 2: mod_base = OTHER; note = 2'-fluorouridine -3'-phosphorothioate
  modified_base 3: mod_base = OTHER; note = 2'-O-methyluridine-3'-phosphate
  modified_base 4: mod_base = OTHER; note = 2'-O-methylcytidine-3'-phosphate
  modified_base 5: mod_base = OTHER; note = 2'-O-methyluridine-3'-phosphate
  modified_base 6: mod_base = OTHER; note = 2'-fluorouridine-3'-phosphate
  modified_base 7: mod_base = OTHER; note = 2'-O-methylguanosine-3'-phosphate
  modified_base 8: mod_base = OTHER; note = 2'-fluorocytidine-3'-phosphate
  modified_base 9: mod_base = OTHER; note = 2'-fluorocytidine-3'-phosphate
  modified_base 10: mod_base = OTHER; note = 2'-O-methyluridine-3'-phosphate
  modified_base 11: mod_base = OTHER; note = 2'-O-methylcytidine-3'-phosphate
  modified_base 12: mod_base = OTHER; note = 2'-O-methylcytidine-3'-phosphate
  modified_base 13: mod_base = OTHER; note = 2'-O-methylcytidine-3'-phosphate
  modified_base 14: mod_base = OTHER; note = 2'-fluorocytidine-3'-phosphate
  modified_base 15: mod_base = OTHER; note = 2'-O-methyladenosine-3'-phosphate
  modified_base 16: mod_base = OTHER; note = 2'-fluorocytidine-3'-phosphate
  modified_base 17: mod_base = OTHER; note = 2'-O-methylcytidine-3'-phosphate
  modified_base 18: mod_base = OTHER; note = 2'-O-methylcytidine-3'-phosphate
  modified_base 19: mod_base = OTHER; note = 2'-O-methylcytidine-3'-phosphate
  modified_base 20: mod_base = OTHER; note = 2'-O-methylcytidine-3'-phosphate
  modified_base 21: mod_base = OTHER; note = 2'-O-methyladenosine-3'-phosphorothioate
  modified_base 22: mod_base = OTHER; note = 2'-O-methyluridine-3'-phosphorothioate
  modified_base 23: mod_base = OTHER; note = 2'-O-methyluridine-3'-phosphate
attcttgcctccccacccccatt

SEQ ID NO: 3626 - DNA, 23 bp, synthetic construct
  source 1..23: mol_type = other DNA
  modified_base 1: mod_base = OTHER; note = 2'-O-methyladenosine-3'-phosphorothioate
  modified_base 2: mod_base = OTHER; note = 2'-deoxythimidine-3'-phosphorothioate
  modified_base 3: mod_base = OTHER; note = 2'-O-methyluridine-3'-phosphate
  modified_base 4: mod_base = OTHER; note = 2'-O-methylcytidine-3'-phosphate
  modified_base 6: mod_base = OTHER; note = 2'-O-methyluridine-3'-phosphate
  modified_base 8: mod_base = OTHER; note = 2'-O-methylcytidine-3'-phosphate
  modified_base 9: mod_base = OTHER; note = 2'-O-methylcytidine-3'-phosphate
  modified_base 10: mod_base = OTHER; note = 2'-O-methyluridine-3'-phosphate
  modified_base 11: mod_base = OTHER; note = 2'-O-methylcytidine-3'-phosphate
  modified_base 13: mod_base = OTHER; note = 2'-O-methylcytidine-3'-phosphate
  modified_base 14: mod_base = OTHER; note = 2'-fluorocytidine-3'-phosphate
  modified_base 15: mod_base = OTHER; note = 2'-O-methyladenosine-3'-phosphate
  modified_base 16: mod_base = OTHER; note = 2'-O-methylcytidine-3'-phosphate
  modified_base 17: mod_base = OTHER; note = 2'-O-methylcytidine-3'-phosphate
  modified_base 18: mod_base = OTHER; note = 2'-O-methylcytidine-3'-phosphate
  modified_base 19: mod_base = OTHER; note = 2'-O-methylcytidine-3'-phosphate
  modified_base 20: mod_base = OTHER; note = 2'-O-methylcytidine-3'-phosphate
  modified_base 21: mod_base = OTHER; note = 2'-O-methyladenosine-3'-phosphorothioate
  modified_base 22: mod_base = OTHER; note = 2'-O-methyluridine-3'-phosphorothioate
  modified_base 23: mod_base = OTHER; note = 2'-O-methyluridine-3'-phosphate
  misc_feature 1: note = RNA
  misc_feature 2: note = DNA
  misc_feature 3..4: note = RNA
  misc_feature 5: note = DNA
  misc_feature 6: note = RNA
  misc_feature 7: note = DNA
  misc_feature 8..11: note = RNA
  misc_feature 12: note = DNA
  misc_feature 13..23: note = RNA
attcttgcctccccacccccatt

SEQ ID NO: 3627 - RNA, 23 nt, synthetic construct
  source 1..23: mol_type = other RNA
  modified_base 1: mod_base = OTHER; note = 2'-O-methyladenosine-3'-phosphorothioate
  modified_base 2: mod_base = OTHER; note = 2'-fluoroguanosine-3'-phosphorothioate
  modified_base 3: mod_base = OTHER; note = 2'-O-methyluridine-3'-phosphate
  modified_base 4: mod_base = OTHER; note = 2'-O-methyluridine-3'-phosphate
  modified_base 5: mod_base = OTHER; note = 2'-O-methylcytidine-3'-phosphate
  modified_base 6: mod_base = OTHER; note = 2'-fluorouridine-3'-phosphate
  modified_base 7: mod_base = OTHER; note = 2'-O-methyluridine-3'-phosphate
  modified_base 8: mod_base = OTHER; note = 2'-fluoroguanosine-3'-phosphate
  modified_base 9: mod_base = OTHER; note = 2'-fluorocytidine-3'-phosphate
  modified_base 10: mod_base = OTHER; note = 2'-O-methylcytidine-3'-phosphate
  modified_base 11: mod_base = OTHER; note = 2'-O-methyluridine-3'-phosphate
  modified_base 12: mod_base = OTHER; note = 2'-O-methylcytidine-3'-phosphate
  modified_base 13: mod_base = OTHER; note = 2'-O-methylcytidine-3'-phosphate
  modified_base 14: mod_base = OTHER; note = 2'-fluorocytidine-3'-phosphate
  modified_base 15: mod_base = OTHER; note = 2'-O-methylcytidine-3'-phosphate
  modified_base 16: mod_base = OTHER; note = 2'-fluoroadenosine-3'-phosphate
  modified_base 17: mod_base = OTHER; note = 2'-O-methylcytidine-3'-phosphate
  modified_base 18: mod_base = OTHER; note = 2'-O-methylcytidine-3'-phosphate
  modified_base 19: mod_base = OTHER; note = 2'-O-methylcytidine-3'-phosphate
  modified_base 20: mod_base = OTHER; note = 2'-O-methylcytidine-3'-phosphate
  modified_base 21: mod_base = OTHER; note = 2'-O-methylcytidine-3'-phosphorothioate
  modified_base 22: mod_base = OTHER; note = 2'-O-methyladenosine-3'-phosphorothioate
  modified_base 23: mod_base = OTHER; note = 2'-O-methyluridine-3'-phosphate
agttcttgcctccccacccccat

SEQ ID NO: 3628 - DNA, 23 bp, synthetic construct
  source 1..23: mol_type = other DNA
  modified_base 1: mod_base = OTHER; note = 2'-O-methyladenosine-3'-phosphorothioate
  modified_base 2: mod_base = OTHER; note = 2'-deoxyguanosine-3'-phosphorothioate
  modified_base 3: mod_base = OTHER; note = 2'-O-methyluridine-3'-phosphate
  modified_base 4: mod_base = OTHER; note = 2'-O-methyluridine-3'-phosphate
  modified_base 6: mod_base = OTHER; note = 2'-O-methyluridine-3'-phosphate
  modified_base 8: mod_base = OTHER; note = 2'-O-methylguanosine-3'-phosphate
  modified_base 9: mod_base = OTHER; note = 2'-O-methylcytidine-3'-phosphate
  modified_base 10: mod_base = OTHER; note = 2'-O-methylcytidine-3'-phosphate
  modified_base 11: mod_base = OTHER; note = 2'-O-methyluridine-3'-phosphate
  modified_base 13: mod_base = OTHER; note = 2'-O-methylcytidine-3'-phosphate
  modified_base 14: mod_base = OTHER; note = 2'-fluorocytidine-3'-phosphate
  modified_base 15: mod_base = OTHER; note = 2'-O-methylcytidine-3'-phosphate
  modified_base 16: mod_base = OTHER; note = 2'-O-methyladenosine-3'-phosphate
  modified_base 17: mod_base = OTHER; note = 2'-O-methylcytidine-3'-phosphate
  modified_base 18: mod_base = OTHER; note = 2'-O-methylcytidine-3'-phosphate
  modified_base 19: mod_base = OTHER; note = 2'-O-methylcytidine-3'-phosphate
  modified_base 20: mod_base = OTHER; note = 2'-O-methylcytidine-3'-phosphate
  modified_base 21: mod_base = OTHER; note = 2'-O-methylcytidine-3'-phosphorothioate
  modified_base 22: mod_base = OTHER; note = 2'-O-methyladenosine-3'-phosphorothioate
  modified_base 23: mod_base = OTHER; note = 2'-O-methyluridine-3'-phosphate
  misc_feature 1: note = RNA
  misc_feature 2: note = DNA
  misc_feature 3..4: note = RNA
  misc_feature 5: note = DNA
  misc_feature 6: note = RNA
  misc_feature 7: note = DNA
  misc_feature 8..11: note = RNA
  misc_feature 12: note = DNA
  misc_feature 13..23: note = RNA
agttcttgcctccccacccccat

SEQ ID NO: 3629 - RNA, 23 nt, synthetic construct
  source 1..23: mol_type = other RNA
  modified_base 1: mod_base = OTHER; note = 2'-O-methyladenosine-3'-phosphorothioate
  modified_base 2: mod_base = OTHER; note = 2'-fluoroadenosine-3'-phosphorothioate
  modified_base 3: mod_base = OTHER; note = 2'-O-methylcytidine-3'-phosphate
  modified_base 4: mod_base = OTHER; note = 2'-O-methyluridine-3'-phosphate
  modified_base 5: mod_base = OTHER; note = 2'-O-methylguanosine-3'-phosphate
  modified_base 6: mod_base = OTHER; note = 2'-fluoroguanosine-3'-phosphate
  modified_base 7: mod_base = OTHER; note = 2'-O-methyluridine-3'-phosphate
  modified_base 8: mod_base = OTHER; note = 2'-fluorouridine-3'-phosphate
  modified_base 9: mod_base = OTHER; note = 2'-fluorocytidine-3'-phosphate
  modified_base 10: mod_base = OTHER; note = 2'-O-methyluridine-3'-phosphate
  modified_base 11: mod_base = OTHER; note = 2'-O-methyluridine-3'-phosphate
  modified_base 12: mod_base = OTHER; note = 2'-O-methylguanosine-3'-phosphate
  modified_base 13: mod_base = OTHER; note = 2'-O-methylcytidine-3'-phosphate
  modified_base 14: mod_base = OTHER; note = 2'-fluorocytidine-3'-phosphate
  modified_base 15: mod_base = OTHER; note = 2'-O-methyluridine-3'-phosphate
  modified_base 16: mod_base = OTHER; note = 2'-fluorocytidine-3'-phosphate
  modified_base 17: mod_base = OTHER; note = 2'-O-methylcytidine-3'-phosphate
  modified_base 18: mod_base = OTHER; note = 2'-O-methylcytidine-3'-phosphate
  modified_base 19: mod_base = OTHER; note = 2'-O-methylcytidine-3'-phosphate
  modified_base 20: mod_base = OTHER; note = 2'-O-methyladenosine-3'-phosphate
  modified_base 21: mod_base = OTHER; note = 2'-O-methylcytidine-3'-phosphorothioate
  modified_base 22: mod_base = OTHER; note = 2'-O-methylcytidine-3'-phosphorothioate
  modified_base 23: mod_base = OTHER; note = 2'-O-methylcytidine-3'-phosphate
aactggttcttgcctccccaccc

SEQ ID NO: 3630 - DNA, 23 bp, synthetic construct
  source 1..23: mol_type = other DNA
  modified_base 1: mod_base = OTHER; note = 2'-O-methyladenosine-3'-phosphorothioate
  modified_base 2: mod_base = OTHER; note = 2'-deoxyadenosine-3'-phosphorothioate
  modified_base 3: mod_base = OTHER; note = 2'-O-methylcytidine-3'-phosphate
  modified_base 4: mod_base = OTHER; note = 2'-O-methyluridine-3'-phosphate
  modified_base 6: mod_base = OTHER; note = 2'-O-methylguanosine-3'-phosphate
  modified_base 8: mod_base = OTHER; note = 2'-O-methyluridine-3'-phosphate
  modified_base 9: mod_base = OTHER; note = 2'-O-methylcytidine-3'-phosphate
  modified_base 10: mod_base = OTHER; note = 2'-O-methyluridine-3'-phosphate
  modified_base 11: mod_base = OTHER; note = 2'-O-methyluridine-3'-phosphate
  modified_base 13: mod_base = OTHER; note = 2'-O-methylcytidine-3'-phosphate
  modified_base 14: mod_base = OTHER; note = 2'-fluorocytidine-3'-phosphate
  modified_base 15: mod_base = OTHER; note = 2'-O-methyluridine-3'-phosphate
  modified_base 16: mod_base = OTHER; note = 2'-O-methylcytidine-3'-phosphate
  modified_base 17: mod_base = OTHER; note = 2'-O-methylcytidine-3'-phosphate
  modified_base 18: mod_base = OTHER; note = 2'-O-methylcytidine-3'-phosphate
  modified_base 19: mod_base = OTHER; note = 2'-O-methylcytidine-3'-phosphate
  modified_base 20: mod_base = OTHER; note = 2'-O-methyladenosine-3'-phosphate
  modified_base 21: mod_base = OTHER; note = 2'-O-methylcytidine-3'-phosphorothioate
  modified_base 22: mod_base = OTHER; note = 2'-O-methylcytidine-3'-phosphorothioate
  modified_base 23: mod_base = OTHER; note = 2'-O-methylcytidine-3'-phosphate
  misc_feature 1: note = RNA
  misc_feature 2: note = DNA
  misc_feature 3..4: note = RNA
  misc_feature 5: note = DNA
  misc_feature 6: note = RNA
  misc_feature 7: note = DNA
  misc_feature 8..11: note = RNA
  misc_feature 12: note = DNA
  misc_feature 13..23: note = RNA
aactggttcttgcctccccaccc

SEQ ID NO: 3631 - RNA, 23 nt, synthetic construct
  source 1..23: mol_type = other RNA
  modified_base 1: mod_base = OTHER; note = 2'-O-methyladenosine-3'-phosphorothioate
  modified_base 2: mod_base = OTHER; note = 2'-fluorocytidine-3'-phosphorothioate
  modified_base 3: mod_base = OTHER; note = 2'-O-methyladenosine-3'-phosphate
  modified_base 4: mod_base = OTHER; note = 2'-O-methylcytidine-3'-phosphate
  modified_base 5: mod_base = OTHER; note = 2'-O-methyluridine-3'-phosphate
  modified_base 6: mod_base = OTHER; note = 2'-fluoroguanosine-3'-phosphate
  modified_base 7: mod_base = OTHER; note = 2'-O-methylguanosine-3'-phosphate
  modified_base 8: mod_base = OTHER; note = 2'-fluorouridine-3'-phosphate
  modified_base 9: mod_base = OTHER; note = 2'-fluorouridine-3'-phosphate
  modified_base 10: mod_base = OTHER; note = 2'-O-methylcytidine-3'-phosphate
  modified_base 11: mod_base = OTHER; note = 2'-O-methyluridine-3'-phosphate
  modified_base 12: mod_base = OTHER; note = 2'-O-methyluridine-3'-phosphate
  modified_base 13: mod_base = OTHER; note = 2'-O-methylguanosine-3'-phosphate
  modified_base 14: mod_base = OTHER; note = 2'-fluorocytidine-3'-phosphate
  modified_base 15: mod_base = OTHER; note = 2'-O-methylcytidine-3'-phosphate
  modified_base 16: mod_base = OTHER; note = 2'-fluorouridine-3'-phosphate
  modified_base 17: mod_base = OTHER; note = 2'-O-methylcytidine-3'-phosphate
  modified_base 18: mod_base = OTHER; note = 2'-O-methylcytidine-3'-phosphate
  modified_base 19: mod_base = OTHER; note = 2'-O-methylcytidine-3'-phosphate
  modified_base 20: mod_base = OTHER; note = 2'-O-methylcytidine-3'-phosphate
  modified_base 21: mod_base = OTHER; note = 2'-O-methyladenosine-3'-phosphorothioate
  modified_base 22: mod_base = OTHER; note = 2'-O-methylcytidine-3'-phosphorothioate
  modified_base 23: mod_base = OTHER; note = 2'-O-methylcytidine-3'-phosphate
acactggttcttgcctccccacc

SEQ ID NO: 3632 - DNA, 23 bp, synthetic construct
  source 1..23: mol_type = other DNA
  modified_base 1: mod_base = OTHER; note = 2'-O-methyladenosine-3'-phosphorothioate
  modified_base 2: mod_base = OTHER; note = 2'-deoxycytidine-3'-phosphorothioate
  modified_base 3: mod_base = OTHER; note = 2'-O-methyladenosine-3'-phosphate
  modified_base 4: mod_base = OTHER; note = 2'-O-methylcytidine-3'-phosphate
  modified_base 6: mod_base = OTHER; note = 2'-O-methylguanosine-3'-phosphate
  modified_base 8: mod_base = OTHER; note = 2'-O-methyluridine-3'-phosphate
  modified_base 9: mod_base = OTHER; note = 2'-O-methyluridine-3'-phosphate
  modified_base 10: mod_base = OTHER; note = 2'-O-methylcytidine-3'-phosphate
  modified_base 11: mod_base = OTHER; note = 2'-O-methyluridine-3'-phosphate
  modified_base 13: mod_base = OTHER; note = 2'-O-methylguanosine-3'-phosphate
  modified_base 14: mod_base = OTHER; note = 2'-fluorocytidine-3'-phosphate
  modified_base 15: mod_base = OTHER; note = 2'-O-methylcytidine-3'-phosphate
  modified_base 16: mod_base = OTHER; note = 2'-O-methyluridine-3'-phosphate
  modified_base 17: mod_base = OTHER; note = 2'-O-methylcytidine-3'-phosphate
  modified_base 18: mod_base = OTHER; note = 2'-O-methylcytidine-3'-phosphate
  modified_base 19: mod_base = OTHER; note = 2'-O-methylcytidine-3'-phosphate
  modified_base 20: mod_base = OTHER; note = 2'-O-methylcytidine-3'-phosphate
  modified_base 21: mod_base = OTHER; note = 2'-O-methyladenosine-3'-phosphorothioate
  modified_base 22: mod_base = OTHER; note = 2'-O-methylcytidine-3'-phosphorothioate
  modified_base 23: mod_base = OTHER; note = 2'-O-methylcytidine-3'-phosphate
  misc_feature 1: note = RNA
  misc_feature 2: note = DNA
  misc_feature 3..4: note = RNA
  misc_feature 5: note = DNA
  misc_feature 6: note = RNA
  misc_feature 7: note = DNA
  misc_feature 8..11: note = RNA
  misc_feature 12: note = DNA
  misc_feature 13..23: note = RNA
acactggttcttgcctccccacc

SEQ ID NO: 3633 - RNA, 23 nt, synthetic construct
  source 1..23: mol_type = other RNA
  modified_base 1: mod_base = OTHER; note = 2'-O-methyladenosine-3'-phosphorothioate
  modified_base 2: mod_base = OTHER; note = 2'-fluoroadenosine-3'-phosphorothioate
  modified_base 3: mod_base = OTHER; note = 2'-O-methylcytidine-3'-phosphate
  modified_base 4: mod_base = OTHER; note = 2'-O-methyladenosine-3'-phosphate
  modified_base 5: mod_base = OTHER; note = 2'-O-methylcytidine-3'-phosphate
  modified_base 6: mod_base = OTHER; note = 2'-fluorouridine-3'-phosphate
  modified_base 7: mod_base = OTHER; note = 2'-O-methylguanosine-3'-phosphate
  modified_base 8: mod_base = OTHER; note = 2'-fluoroguanosine-3'-phosphate
  modified_base 9: mod_base = OTHER; note = 2'-fluorouridine-3'-phosphate
  modified_base 10: mod_base = OTHER; note = 2'-O-methyluridine-3'-phosphate
  modified_base 11: mod_base = OTHER; note = 2'-O-methylcytidine-3'-phosphate
  modified_base 12: mod_base = OTHER; note = 2'-O-methyluridine-3'-phosphate
  modified_base 13: mod_base = OTHER; note = 2'-O-methyluridine-3'-phosphate
  modified_base 14: mod_base = OTHER; note = 2'-fluoroguanosine-3'-phosphate
  modified_base 15: mod_base = OTHER; note = 2'-O-methylcytidine-3'-phosphate
  modified_base 16: mod_base = OTHER; note = 2'-fluorocytidine-3'-phosphate
  modified_base 17: mod_base = OTHER; note = 2'-O-methyluridine-3'-phosphate
  modified_base 18: mod_base = OTHER; note = 2'-O-methylcytidine-3'-phosphate
  modified_base 19: mod_base = OTHER; note = 2'-O-methylcytidine-3'-phosphate
  modified_base 20: mod_base = OTHER; note = 2'-O-methylcytidine-3'-phosphate
  modified_base 21: mod_base = OTHER; note = 2'-O-methylcytidine-3'-phosphorothioate
  modified_base 22: mod_base = OTHER; note = 2'-O-methyladenosine-3'-phosphorothioate
  modified_base 23: mod_base = OTHER; note = 2'-O-methylcytidine-3'-phosphate
aacactggttcttgcctccccac

SEQ ID NO: 3634 - DNA, 23 bp, synthetic construct
  source 1..23: mol_type = other DNA
  modified_base 1: mod_base = OTHER; note = 2'-O-methyladenosine-3'-phosphorothioate
  modified_base 2: mod_base = OTHER; note = 2'-deoxyadenosine-3'-phosphorothioate
  modified_base 3: mod_base = OTHER; note = 2'-O-methylcytidine-3'-phosphate
  modified_base 4: mod_base = OTHER; note = 2'-O-methyladenosine-3'-phosphate
  modified_base 6: mod_base = OTHER; note = 2'-O-methyluridine-3'-phosphate
  modified_base 8: mod_base = OTHER; note = 2'-O-methylguanosine-3'-phosphate
  modified_base 9: mod_base = OTHER; note = 2'-O-methyluridine-3'-phosphate
  modified_base 10: mod_base = OTHER; note = 2'-O-methyluridine-3'-phosphate
  modified_base 11: mod_base = OTHER; note = 2'-O-methylcytidine-3'-phosphate
  modified_base 13: mod_base = OTHER; note = 2'-O-methyluridine-3'-phosphate
  modified_base 14: mod_base = OTHER; note = 2'-fluoroguanosine-3'-phosphate
  modified_base 15: mod_base = OTHER; note = 2'-O-methylcytidine-3'-phosphate
  modified_base 16: mod_base = OTHER; note = 2'-O-methylcytidine-3'-phosphate
  modified_base 17: mod_base = OTHER; note = 2'-O-methyluridine-3'-phosphate
  modified_base 18: mod_base = OTHER; note = 2'-O-methylcytidine-3'-phosphate
  modified_base 19: mod_base = OTHER; note = 2'-O-methylcytidine-3'-phosphate
  modified_base 20: mod_base = OTHER; note = 2'-O-methylcytidine-3'-phosphate
  modified_base 21: mod_base = OTHER; note = 2'-O-methylcytidine-3'-phosphorothioate
  modified_base 22: mod_base = OTHER; note = 2'-O-methyladenosine-3'-phosphorothioate
  modified_base 23: mod_base = OTHER; note = 2'-O-methylcytidine-3'-phosphate
  misc_feature 1: note = RNA
  misc_feature 2: note = DNA
  misc_feature 3..4: note = RNA
  misc_feature 5: note = DNA
  misc_feature 6: note = RNA
  misc_feature 7: note = DNA
  misc_feature 8..11: note = RNA
  misc_feature 12: note = DNA
  misc_feature 13..23: note = RNA
aacactggttcttgcctccccac

SEQ ID NO: 3635 - DNA, 23 bp, synthetic construct
  source 1..23: mol_type = other DNA
  modified_base 1: mod_base = OTHER; note = 2'-O-methyladenosine-3'-phosphorothioate
  modified_base 2: mod_base = OTHER; note = 2'-deoxyadenosine-3'-phosphorothioate
  modified_base 3: mod_base = OTHER; note = 2'-O-methyladenosine-3'-phosphate
  modified_base 4: mod_base = OTHER; note = 2'-O-methylcytidine-3'-phosphate
  modified_base 6: mod_base = OTHER; note = 2'-O-methylcytidine-3'-phosphate
  modified_base 8: mod_base = OTHER; note = 2'-O-methylguanosine-3'-phosphate
  modified_base 9: mod_base = OTHER; note = 2'-O-methylguanosine-3'-phosphate
  modified_base 10: mod_base = OTHER; note = 2'-O-methyluridine-3'-phosphate
  modified_base 11: mod_base = OTHER; note = 2'-O-methyluridine-3'-phosphate
  modified_base 13: mod_base = OTHER; note = 2'-O-methyluridine-3'-phosphate
  modified_base 14: mod_base = OTHER; note = 2'-fluorouridine-3'-phosphate
  modified_base 15: mod_base = OTHER; note = 2'-O-methylguanosine-3'-phosphate
  modified_base 16: mod_base = OTHER; note = 2'-O-methylcytidine-3'-phosphate
  modified_base 17: mod_base = OTHER; note = 2'-O-methylcytidine-3'-phosphate
  modified_base 18: mod_base = OTHER; note = 2'-O-methyluridine-3'-phosphate
  modified_base 19: mod_base = OTHER; note = 2'-O-methylcytidine-3'-phosphate
  modified_base 20: mod_base = OTHER; note = 2'-O-methylcytidine-3'-phosphate
  modified_base 21: mod_base = OTHER; note = 2'-O-methylcytidine-3'-phosphorothioate
  modified_base 22: mod_base = OTHER; note = 2'-O-methylcytidine-3'-phosphorothioate
  modified_base 23: mod_base = OTHER; note = 2'-O-methyladenosine-3'-phosphate
  misc_feature 1: note = RNA
  misc_feature 2: note = DNA
  misc_feature 3..4: note = RNA
  misc_feature 5: note = DNA
  misc_feature 6: note = RNA
  misc_feature 7: note = DNA
  misc_feature 8..11: note = RNA
  misc_feature 12: note = DNA
  misc_feature 13..23: note = RNA
aaacactggttcttgcctcccca

SEQ ID NO: 3636 - DNA, 23 bp, synthetic construct
  source 1..23: mol_type = other DNA
  modified_base 1: mod_base = OTHER; note = 2'-O-methyladenosine-3'-phosphorothioate
  modified_base 2: mod_base = OTHER; note = 2'-deoxyadenosine-3'-phosphorothioate
  modified_base 3: mod_base = OTHER; note = 2'-O-methyladenosine-3'-phosphate
  modified_base 4: mod_base = OTHER; note = 2'-O-methyladenosine-3'-phosphate
  modified_base 6: mod_base = OTHER; note = 2'-O-methyladenosine-3'-phosphate
  modified_base 8: mod_base = OTHER; note = 2'-O-methyluridine-3'-phosphate
  modified_base 9: mod_base = OTHER; note = 2'-O-methylguanosine-3'-phosphate
  modified_base 10: mod_base = OTHER; note = 2'-O-methylguanosine-3'-phosphate
  modified_base 11: mod_base = OTHER; note = 2'-O-methyluridine-3'-phosphate
  modified_base 13: mod_base = OTHER; note = 2'-O-methylcytidine-3'-phosphate
  modified_base 14: mod_base = OTHER; note = 2'-fluorouridine-3'-phosphate
  modified_base 15: mod_base = OTHER; note = 2'-O-methyluridine-3'-phosphate
  modified_base 16: mod_base = OTHER; note = 2'-O-methylguanosine-3'-phosphate
  modified_base 17: mod_base = OTHER; note = 2'-O-methylcytidine-3'-phosphate
  modified_base 18: mod_base = OTHER; note = 2'-O-methylcytidine-3'-phosphate
  modified_base 19: mod_base = OTHER; note = 2'-O-methyluridine-3'-phosphate
  modified_base 20: mod_base = OTHER; note = 2'-O-methylcytidine-3'-phosphate
  modified_base 21: mod_base = OTHER; note = 2'-O-methylcytidine-3'-phosphorothioate
  modified_base 22: mod_base = OTHER; note = 2'-O-methylcytidine-3'-phosphorothioate
  modified_base 23: mod_base = OTHER; note = 2'-O-methylcytidine-3'-phosphate
  misc_feature 1: note = RNA
  misc_feature 2: note = DNA
  misc_feature 3..4: note = RNA
  misc_feature 5: note = DNA
  misc_feature 6: note = RNA
  misc_feature 7: note = DNA
  misc_feature 8..11: note = RNA
  misc_feature 12: note = DNA
  misc_feature 13..23: note = RNA
aaaacactggttcttgcctcccc

SEQ ID NO: 3637 - RNA, 23 nt, synthetic construct
  source 1..23: mol_type = other RNA
  modified_base 1: mod_base = OTHER; note = 2'-O-methyladenosine-3'-phosphorothioate
  modified_base 2: mod_base = OTHER; note = 2'-fluorouridine -3'-phosphorothioate
  modified_base 3: mod_base = OTHER; note = 2'-O-methyluridine-3'-phosphate
  modified_base 4: mod_base = OTHER; note = 2'-O-methyluridine-3'-phosphate
  modified_base 5: mod_base = OTHER; note = 2'-O-methyluridine-3'-phosphate
  modified_base 6: mod_base = OTHER; note = 2'-fluorouridine-3'-phosphate
  modified_base 7: mod_base = OTHER; note = 2'-O-methylguanosine-3'-phosphate
  modified_base 8: mod_base = OTHER; note = 2'-fluorouridine-3'-phosphate
  modified_base 9: mod_base = OTHER; note = 2'-fluorouridine-3'-phosphate
  modified_base 10: mod_base = OTHER; note = 2'-O-methyluridine-3'-phosphate
  modified_base 11: mod_base = OTHER; note = 2'-O-methylcytidine-3'-phosphate
  modified_base 12: mod_base = OTHER; note = 2'-O-methyladenosine-3'-phosphate
  modified_base 13: mod_base = OTHER; note = 2'-O-methylcytidine-3'-phosphate
  modified_base 14: mod_base = OTHER; note = 2'-fluoroadenosine-3'-phosphate
  modified_base 15: mod_base = OTHER; note = 2'-O-methyladenosine-3'-phosphate
  modified_base 16: mod_base = OTHER; note = 2'-fluoroadenosine-3'-phosphate
  modified_base 17: mod_base = OTHER; note = 2'-O-methylcytidine-3'-phosphate
  modified_base 18: mod_base = OTHER; note = 2'-O-methyladenosine-3'-phosphate
  modified_base 19: mod_base = OTHER; note = 2'-O-methyladenosine-3'-phosphate
  modified_base 20: mod_base = OTHER; note = 2'-O-methylguanosine-3'-phosphate
  modified_base 21: mod_base = OTHER; note = 2'-O-methylcytidine-3'-phosphorothioate
  modified_base 22: mod_base = OTHER; note = 2'-O-methyluridine-3'-phosphorothioate
  modified_base 23: mod_base = OTHER; note = 2'-O-methylguanosine-3'-phosphate
atttttgtttcacaaacaagctg

SEQ ID NO: 3638 - RNA, 23 nt, synthetic construct
  source 1..23: mol_type = other RNA
  modified_base 1: mod_base = OTHER; note = 2'-O-methyladenosine-3'-phosphorothioate
  modified_base 2: mod_base = OTHER; note = 2'-fluorouridine -3'-phosphorothioate
  modified_base 3: mod_base = OTHER; note = 2'-O-methyluridine-3'-phosphate
  modified_base 4: mod_base = OTHER; note = 2'-O-methyluridine-3'-phosphate
  modified_base 5: mod_base = OTHER; note = 2'-O-methyluridine-3'-phosphate
  modified_base 6: mod_base = OTHER; note = 2'-fluorouridine-3'-phosphate
  modified_base 7: mod_base = OTHER; note = 2'-O-methyluridine-3'-phosphate
  modified_base 8: mod_base = OTHER; note = 2'-fluoroguanosine-3'-phosphate
  modified_base 9: mod_base = OTHER; note = 2'-fluorouridine-3'-phosphate
  modified_base 10: mod_base = OTHER; note = 2'-O-methyluridine-3'-phosphate
  modified_base 11: mod_base = OTHER; note = 2'-O-methyluridine-3'-phosphate
  modified_base 12: mod_base = OTHER; note = 2'-O-methylcytidine-3'-phosphate
  modified_base 13: mod_base = OTHER; note = 2'-O-methyladenosine-3'-phosphate
  modified_base 14: mod_base = OTHER; note = 2'-fluorocytidine-3'-phosphate
  modified_base 15: mod_base = OTHER; note = 2'-O-methyladenosine-3'-phosphate
  modified_base 16: mod_base = OTHER; note = 2'-fluoroadenosine-3'-phosphate
  modified_base 17: mod_base = OTHER; note = 2'-O-methyladenosine-3'-phosphate
  modified_base 18: mod_base = OTHER; note = 2'-O-methylcytidine-3'-phosphate
  modified_base 19: mod_base = OTHER; note = 2'-O-methyladenosine-3'-phosphate
  modified_base 20: mod_base = OTHER; note = 2'-O-methyladenosine-3'-phosphate
  modified_base 21: mod_base = OTHER; note = 2'-O-methylguanosine-3'-phosphorothioate
  modified_base 22: mod_base = OTHER; note = 2'-O-methylcytidine-3'-phosphorothioate
  modified_base 23: mod_base = OTHER; note = 2'-O-methyluridine-3'-phosphate
attttttgtttcacaaacaagct

SEQ ID NO: 3639 - RNA, 23 nt, synthetic construct
  source 1..23: mol_type = other RNA
  modified_base 1: mod_base = OTHER; note = 2'-O-methyladenosine-3'-phosphorothioate
  modified_base 2: mod_base = OTHER; note = 2'-fluorocytidine-3'-phosphorothioate
  modified_base 3: mod_base = OTHER; note = 2'-O-methyluridine-3'-phosphate
  modified_base 4: mod_base = OTHER; note = 2'-O-methyluridine-3'-phosphate
  modified_base 5: mod_base = OTHER; note = 2'-O-methyluridine-3'-phosphate
  modified_base 6: mod_base = OTHER; note = 2'-fluorouridine-3'-phosphate
  modified_base 7: mod_base = OTHER; note = 2'-O-methyluridine-3'-phosphate
  modified_base 8: mod_base = OTHER; note = 2'-fluorouridine-3'-phosphate
  modified_base 9: mod_base = OTHER; note = 2'-fluoroguanosine-3'-phosphate
  modified_base 10: mod_base = OTHER; note = 2'-O-methyluridine-3'-phosphate
  modified_base 11: mod_base = OTHER; note = 2'-O-methyluridine-3'-phosphate
  modified_base 12: mod_base = OTHER; note = 2'-O-methyluridine-3'-phosphate
  modified_base 13: mod_base = OTHER; note = 2'-O-methylcytidine-3'-phosphate
  modified_base 14: mod_base = OTHER; note = 2'-fluoroadenosine-3'-phosphate
  modified_base 15: mod_base = OTHER; note = 2'-O-methylcytidine-3'-phosphate
  modified_base 16: mod_base = OTHER; note = 2'-fluoroadenosine-3'-phosphate
  modified_base 17: mod_base = OTHER; note = 2'-O-methyladenosine-3'-phosphate
  modified_base 18: mod_base = OTHER; note = 2'-O-methyladenosine-3'-phosphate
  modified_base 19: mod_base = OTHER; note = 2'-O-methylcytidine-3'-phosphate
  modified_base 20: mod_base = OTHER; note = 2'-O-methyladenosine-3'-phosphate
  modified_base 21: mod_base = OTHER; note = 2'-O-methyladenosine-3'-phosphorothioate
  modified_base 22: mod_base = OTHER; note = 2'-O-methylguanosine-3'-phosphorothioate
  modified_base 23: mod_base = OTHER; note = 2'-O-methylcytidine-3'-phosphate
acttttttgtttcacaaacaagc

SEQ ID NO: 3640 - RNA, 23 nt, synthetic construct
  source 1..23: mol_type = other RNA
  modified_base 1: mod_base = OTHER; note = 2'-O-methyladenosine-3'-phosphorothioate
  modified_base 2: mod_base = OTHER; note = 2'-fluorocytidine-3'-phosphorothioate
  modified_base 3: mod_base = OTHER; note = 2'-O-methyladenosine-3'-phosphate
  modified_base 4: mod_base = OTHER; note = 2'-O-methyluridine-3'-phosphate
  modified_base 5: mod_base = OTHER; note = 2'-O-methylcytidine-3'-phosphate
  modified_base 6: mod_base = OTHER; note = 2'-fluorouridine-3'-phosphate
  modified_base 7: mod_base = OTHER; note = 2'-O-methylguanosine-3'-phosphate
  modified_base 8: mod_base = OTHER; note = 2'-fluorouridine-3'-phosphate
  modified_base 9: mod_base = OTHER; note = 2'-fluoroguanosine-3'-phosphate
  modified_base 10: mod_base = OTHER; note = 2'-O-methylguanosine-3'-phosphate
  modified_base 11: mod_base = OTHER; note = 2'-O-methyladenosine-3'-phosphate
  modified_base 12: mod_base = OTHER; note = 2'-O-methyladenosine-3'-phosphate
  modified_base 13: mod_base = OTHER; note = 2'-O-methyladenosine-3'-phosphate
  modified_base 14: mod_base = OTHER; note = 2'-fluoroadenosine-3'-phosphate
  modified_base 15: mod_base = OTHER; note = 2'-O-methyladenosine-3'-phosphate
  modified_base 16: mod_base = OTHER; note = 2'-fluoroadenosine-3'-phosphate
  modified_base 17: mod_base = OTHER; note = 2'-O-methylcytidine-3'-phosphate
  modified_base 18: mod_base = OTHER; note = 2'-O-methyluridine-3'-phosphate
  modified_base 19: mod_base = OTHER; note = 2'-O-methyladenosine-3'-phosphate
  modified_base 20: mod_base = OTHER; note = 2'-O-methyladenosine-3'-phosphate
  modified_base 21: mod_base = OTHER; note = 2'-O-methylguanosine-3'-phosphorothioate
  modified_base 22: mod_base = OTHER; note = 2'-O-methylguanosine-3'-phosphorothioate
  modified_base 23: mod_base = OTHER; note = 2'-O-methyluridine-3'-phosphate
acatctgtggaaaaaactaaggt

SEQ ID NO: 3641 - RNA, 23 nt, synthetic construct
  source 1..23: mol_type = other RNA
  modified_base 1: mod_base = OTHER; note = 2'-O-methyladenosine-3'-phosphorothioate
  modified_base 2: mod_base = OTHER; note = 2'-fluoroguanosine-3'-phosphorothioate
  modified_base 3: mod_base = OTHER; note = 2'-O-methylcytidine-3'-phosphate
  modified_base 4: mod_base = OTHER; note = 2'-O-methyladenosine-3'-phosphate
  modified_base 5: mod_base = OTHER; note = 2'-O-methyluridine-3'-phosphate
  modified_base 6: mod_base = OTHER; note = 2'-fluorocytidine-3'-phosphate
  modified_base 7: mod_base = OTHER; note = 2'-O-methyluridine-3'-phosphate
  modified_base 8: mod_base = OTHER; note = 2'-fluoroguanosine-3'-phosphate
  modified_base 9: mod_base = OTHER; note = 2'-fluorouridine-3'-phosphate
  modified_base 10: mod_base = OTHER; note = 2'-O-methylguanosine-3'-phosphate
  modified_base 11: mod_base = OTHER; note = 2'-O-methylguanosine-3'-phosphate
  modified_base 12: mod_base = OTHER; note = 2'-O-methyladenosine-3'-phosphate
  modified_base 13: mod_base = OTHER; note = 2'-O-methyladenosine-3'-phosphate
  modified_base 14: mod_base = OTHER; note = 2'-fluoroadenosine-3'-phosphate
  modified_base 15: mod_base = OTHER; note = 2'-O-methyladenosine-3'-phosphate
  modified_base 16: mod_base = OTHER; note = 2'-fluoroadenosine-3'-phosphate
  modified_base 17: mod_base = OTHER; note = 2'-O-methyladenosine-3'-phosphate
  modified_base 18: mod_base = OTHER; note = 2'-O-methylcytidine-3'-phosphate
  modified_base 19: mod_base = OTHER; note = 2'-O-methyluridine-3'-phosphate
  modified_base 20: mod_base = OTHER; note = 2'-O-methyladenosine-3'-phosphate
  modified_base 21: mod_base = OTHER; note = 2'-O-methyladenosine-3'-phosphorothioate
  modified_base 22: mod_base = OTHER; note = 2'-O-methylguanosine-3'-phosphorothioate
  modified_base 23: mod_base = OTHER; note = 2'-O-methylguanosine-3'-phosphate
agcatctgtggaaaaaactaagg

SEQ ID NO: 3642 - RNA, 23 nt, synthetic construct
  source 1..23: mol_type = other RNA
  modified_base 1: mod_base = OTHER; note = 2'-O-methyladenosine-3'-phosphorothioate
  modified_base 2: mod_base = OTHER; note = 2'-fluoroadenosine-3'-phosphorothioate
  modified_base 3: mod_base = OTHER; note = 2'-O-methylguanosine-3'-phosphate
  modified_base 4: mod_base = OTHER; note = 2'-O-methylcytidine-3'-phosphate
  modified_base 5: mod_base = OTHER; note = 2'-O-methyladenosine-3'-phosphate
  modified_base 6: mod_base = OTHER; note = 2'-fluorouridine-3'-phosphate
  modified_base 7: mod_base = OTHER; note = 2'-O-methylcytidine-3'-phosphate
  modified_base 8: mod_base = OTHER; note = 2'-fluorouridine-3'-phosphate
  modified_base 9: mod_base = OTHER; note = 2'-fluoroguanosine-3'-phosphate
  modified_base 10: mod_base = OTHER; note = 2'-O-methyluridine-3'-phosphate
  modified_base 11: mod_base = OTHER; note = 2'-O-methylguanosine-3'-phosphate
  modified_base 12: mod_base = OTHER; note = 2'-O-methylguanosine-3'-phosphate
  modified_base 13: mod_base = OTHER; note = 2'-O-methyladenosine-3'-phosphate
  modified_base 14: mod_base = OTHER; note = 2'-fluoroadenosine-3'-phosphate
  modified_base 15: mod_base = OTHER; note = 2'-O-methyladenosine-3'-phosphate
  modified_base 16: mod_base = OTHER; note = 2'-fluoroadenosine-3'-phosphate
  modified_base 17: mod_base = OTHER; note = 2'-O-methyladenosine-3'-phosphate
  modified_base 18: mod_base = OTHER; note = 2'-O-methyladenosine-3'-phosphate
  modified_base 19: mod_base = OTHER; note = 2'-O-methylcytidine-3'-phosphate
  modified_base 20: mod_base = OTHER; note = 2'-O-methyluridine-3'-phosphate
  modified_base 21: mod_base = OTHER; note = 2'-O-methyladenosine-3'-phosphorothioate
  modified_base 22: mod_base = OTHER; note = 2'-O-methyladenosine-3'-phosphorothioate
  modified_base 23: mod_base = OTHER; note = 2'-O-methylguanosine-3'-phosphate
aagcatctgtggaaaaaactaag

SEQ ID NO: 3643 - RNA, 23 nt, synthetic construct
  source 1..23: mol_type = other RNA
  modified_base 1: mod_base = OTHER; note = 2'-O-methyladenosine-3'-phosphorothioate
  modified_base 2: mod_base = OTHER; note = 2'-fluorocytidine-3'-phosphorothioate
  modified_base 3: mod_base = OTHER; note = 2'-O-methyladenosine-3'-phosphate
  modified_base 4: mod_base = OTHER; note = 2'-O-methyladenosine-3'-phosphate
  modified_base 5: mod_base = OTHER; note = 2'-O-methylguanosine-3'-phosphate
  modified_base 6: mod_base = OTHER; note = 2'-fluorocytidine-3'-phosphate
  modified_base 7: mod_base = OTHER; note = 2'-O-methyladenosine-3'-phosphate
  modified_base 8: mod_base = OTHER; note = 2'-fluorouridine-3'-phosphate
  modified_base 9: mod_base = OTHER; note = 2'-fluorocytidine-3'-phosphate
  modified_base 10: mod_base = OTHER; note = 2'-O-methyluridine-3'-phosphate
  modified_base 11: mod_base = OTHER; note = 2'-O-methylguanosine-3'-phosphate
  modified_base 12: mod_base = OTHER; note = 2'-O-methyluridine-3'-phosphate
  modified_base 13: mod_base = OTHER; note = 2'-O-methylguanosine-3'-phosphate
  modified_base 14: mod_base = OTHER; note = 2'-fluoroguanosine-3'-phosphate
  modified_base 15: mod_base = OTHER; note = 2'-O-methyladenosine-3'-phosphate
  modified_base 16: mod_base = OTHER; note = 2'-fluoroadenosine-3'-phosphate
  modified_base 17: mod_base = OTHER; note = 2'-O-methyladenosine-3'-phosphate
  modified_base 18: mod_base = OTHER; note = 2'-O-methyladenosine-3'-phosphate
  modified_base 19: mod_base = OTHER; note = 2'-O-methyladenosine-3'-phosphate
  modified_base 20: mod_base = OTHER; note = 2'-O-methyladenosine-3'-phosphate
  modified_base 21: mod_base = OTHER; note = 2'-O-methylcytidine-3'-phosphorothioate
  modified_base 22: mod_base = OTHER; note = 2'-O-methyluridine-3'-phosphorothioate
  modified_base 23: mod_base = OTHER; note = 2'-O-methyladenosine-3'-phosphate
acaagcatctgtggaaaaaacta

SEQ ID NO: 3644 - RNA, 23 nt, synthetic construct
  source 1..23: mol_type = other RNA
  modified_base 1: mod_base = OTHER; note = 2'-O-methyladenosine-3'-phosphorothioate
  modified_base 2: mod_base = OTHER; note = 2'-fluorocytidine-3'-phosphorothioate
  modified_base 3: mod_base = OTHER; note = 2'-O-methyladenosine-3'-phosphate
  modified_base 4: mod_base = OTHER; note = 2'-O-methylcytidine-3'-phosphate
  modified_base 5: mod_base = OTHER; note = 2'-O-methyladenosine-3'-phosphate
  modified_base 6: mod_base = OTHER; note = 2'-fluoroadenosine-3'-phosphate
  modified_base 7: mod_base = OTHER; note = 2'-O-methylguanosine-3'-phosphate
  modified_base 8: mod_base = OTHER; note = 2'-fluorocytidine-3'-phosphate
  modified_base 9: mod_base = OTHER; note = 2'-fluoroadenosine-3'-phosphate
  modified_base 10: mod_base = OTHER; note = 2'-O-methyluridine-3'-phosphate
  modified_base 11: mod_base = OTHER; note = 2'-O-methylcytidine-3'-phosphate
  modified_base 12: mod_base = OTHER; note = 2'-O-methyluridine-3'-phosphate
  modified_base 13: mod_base = OTHER; note = 2'-O-methylguanosine-3'-phosphate
  modified_base 14: mod_base = OTHER; note = 2'-fluorouridine-3'-phosphate
  modified_base 15: mod_base = OTHER; note = 2'-O-methylguanosine-3'-phosphate
  modified_base 16: mod_base = OTHER; note = 2'-fluoroguanosine-3'-phosphate
  modified_base 17: mod_base = OTHER; note = 2'-O-methyladenosine-3'-phosphate
  modified_base 18: mod_base = OTHER; note = 2'-O-methyladenosine-3'-phosphate
  modified_base 19: mod_base = OTHER; note = 2'-O-methyladenosine-3'-phosphate
  modified_base 20: mod_base = OTHER; note = 2'-O-methyladenosine-3'-phosphate
  modified_base 21: mod_base = OTHER; note = 2'-O-methyladenosine-3'-phosphorothioate
  modified_base 22: mod_base = OTHER; note = 2'-O-methyladenosine-3'-phosphorothioate
  modified_base 23: mod_base = OTHER; note = 2'-O-methylcytidine-3'-phosphate
acacaagcatctgtggaaaaaac

SEQ ID NO: 3645 - RNA, 23 nt, synthetic construct
  source 1..23: mol_type = other RNA
  modified_base 1: mod_base = OTHER; note = 2'-O-methyladenosine-3'-phosphorothioate
  modified_base 2: mod_base = OTHER; note = 2'-fluorouridine -3'-phosphorothioate
  modified_base 3: mod_base = OTHER; note = 2'-O-methylcytidine-3'-phosphate
  modified_base 4: mod_base = OTHER; note = 2'-O-methyladenosine-3'-phosphate
  modified_base 5: mod_base = OTHER; note = 2'-O-methylcytidine-3'-phosphate
  modified_base 6: mod_base = OTHER; note = 2'-fluoroadenosine-3'-phosphate
  modified_base 7: mod_base = OTHER; note = 2'-O-methyladenosine-3'-phosphate
  modified_base 8: mod_base = OTHER; note = 2'-fluoroguanosine-3'-phosphate
  modified_base 9: mod_base = OTHER; note = 2'-fluorocytidine-3'-phosphate
  modified_base 10: mod_base = OTHER; note = 2'-O-methyladenosine-3'-phosphate
  modified_base 11: mod_base = OTHER; note = 2'-O-methyluridine-3'-phosphate
  modified_base 12: mod_base = OTHER; note = 2'-O-methylcytidine-3'-phosphate
  modified_base 13: mod_base = OTHER; note = 2'-O-methyluridine-3'-phosphate
  modified_base 14: mod_base = OTHER; note = 2'-fluoroguanosine-3'-phosphate
  modified_base 15: mod_base = OTHER; note = 2'-O-methyluridine-3'-phosphate
  modified_base 16: mod_base = OTHER; note = 2'-fluoroguanosine-3'-phosphate
  modified_base 17: mod_base = OTHER; note = 2'-O-methylguanosine-3'-phosphate
  modified_base 18: mod_base = OTHER; note = 2'-O-methyladenosine-3'-phosphate
  modified_base 19: mod_base = OTHER; note = 2'-O-methyladenosine-3'-phosphate
  modified_base 20: mod_base = OTHER; note = 2'-O-methyladenosine-3'-phosphate
  modified_base 21: mod_base = OTHER; note = 2'-O-methyladenosine-3'-phosphorothioate
  modified_base 22: mod_base = OTHER; note = 2'-O-methyladenosine-3'-phosphorothioate
  modified_base 23: mod_base = OTHER; note = 2'-O-methyladenosine-3'-phosphate
atcacaagcatctgtggaaaaaa

SEQ ID NO: 3646 - RNA, 23 nt, synthetic construct
  source 1..23: mol_type = other RNA
  modified_base 1: mod_base = OTHER; note = 2'-O-methyladenosine-3'-phosphorothioate
  modified_base 2: mod_base = OTHER; note = 2'-fluorouridine -3'-phosphorothioate
  modified_base 3: mod_base = OTHER; note = 2'-O-methyluridine-3'-phosphate
  modified_base 4: mod_base = OTHER; note = 2'-O-methyladenosine-3'-phosphate
  modified_base 5: mod_base = OTHER; note = 2'-O-methylguanosine-3'-phosphate
  modified_base 6: mod_base = OTHER; note = 2'-fluoroadenosine-3'-phosphate
  modified_base 7: mod_base = OTHER; note = 2'-O-methyladenosine-3'-phosphate
  modified_base 8: mod_base = OTHER; note = 2'-fluoroguanosine-3'-phosphate
  modified_base 9: mod_base = OTHER; note = 2'-fluoroadenosine-3'-phosphate
  modified_base 10: mod_base = OTHER; note = 2'-O-methyladenosine-3'-phosphate
  modified_base 11: mod_base = OTHER; note = 2'-O-methyladenosine-3'-phosphate
  modified_base 12: mod_base = OTHER; note = 2'-O-methyladenosine-3'-phosphate
  modified_base 13: mod_base = OTHER; note = 2'-O-methylguanosine-3'-phosphate
  modified_base 14: mod_base = OTHER; note = 2'-fluoroguanosine-3'-phosphate
  modified_base 15: mod_base = OTHER; note = 2'-O-methyluridine-3'-phosphate
  modified_base 16: mod_base = OTHER; note = 2'-fluoroguanosine-3'-phosphate
  modified_base 17: mod_base = OTHER; note = 2'-O-methylguanosine-3'-phosphate
  modified_base 18: mod_base = OTHER; note = 2'-O-methylguanosine-3'-phosphate
  modified_base 19: mod_base = OTHER; note = 2'-O-methyladenosine-3'-phosphate
  modified_base 20: mod_base = OTHER; note = 2'-O-methylguanosine-3'-phosphate
  modified_base 21: mod_base = OTHER; note = 2'-O-methyladenosine-3'-phosphorothioate
  modified_base 22: mod_base = OTHER; note = 2'-O-methylcytidine-3'-phosphorothioate
  modified_base 23: mod_base = OTHER; note = 2'-O-methyluridine-3'-phosphate
attagaagaaaaggtgggagact

SEQ ID NO: 3647 - RNA, 23 nt, synthetic construct
  source 1..23: mol_type = other RNA
  modified_base 1: mod_base = OTHER; note = 2'-O-methyladenosine-3'-phosphorothioate
  modified_base 2: mod_base = OTHER; note = 2'-fluoroadenosine-3'-phosphorothioate
  modified_base 3: mod_base = OTHER; note = 2'-O-methyladenosine-3'-phosphate
  modified_base 4: mod_base = OTHER; note = 2'-O-methylcytidine-3'-phosphate
  modified_base 5: mod_base = OTHER; note = 2'-O-methyladenosine-3'-phosphate
  modified_base 6: mod_base = OTHER; note = 2'-fluoroadenosine-3'-phosphate
  modified_base 7: mod_base = OTHER; note = 2'-O-methylguanosine-3'-phosphate
  modified_base 8: mod_base = OTHER; note = 2'-fluorocytidine-3'-phosphate
  modified_base 9: mod_base = OTHER; note = 2'-fluorouridine-3'-phosphate
  modified_base 10: mod_base = OTHER; note = 2'-O-methylguanosine-3'-phosphate
  modified_base 11: mod_base = OTHER; note = 2'-O-methylguanosine-3'-phosphate
  modified_base 12: mod_base = OTHER; note = 2'-O-methyluridine-3'-phosphate
  modified_base 13: mod_base = OTHER; note = 2'-O-methylcytidine-3'-phosphate
  modified_base 14: mod_base = OTHER; note = 2'-fluoroguanosine-3'-phosphate
  modified_base 15: mod_base = OTHER; note = 2'-O-methylguanosine-3'-phosphate
  modified_base 16: mod_base = OTHER; note = 2'-fluorouridine-3'-phosphate
  modified_base 17: mod_base = OTHER; note = 2'-O-methyluridine-3'-phosphate
  modified_base 18: mod_base = OTHER; note = 2'-O-methylguanosine-3'-phosphate
  modified_base 19: mod_base = OTHER; note = 2'-O-methylguanosine-3'-phosphate
  modified_base 20: mod_base = OTHER; note = 2'-O-methyladenosine-3'-phosphate
  modified_base 21: mod_base = OTHER; note = 2'-O-methyladenosine-3'-phosphorothioate
  modified_base 22: mod_base = OTHER; note = 2'-O-methyluridine-3'-phosphorothioate
  modified_base 23: mod_base = OTHER; note = 2'-O-methyluridine-3'-phosphate
aaacaagctggtcggttggaatt

SEQ ID NO: 3648 - RNA, 23 nt, synthetic construct
  source 1..23: mol_type = other RNA
  modified_base 1: mod_base = OTHER; note = 2'-O-methyladenosine-3'-phosphorothioate
  modified_base 2: mod_base = OTHER; note = 2'-fluorocytidine-3'-phosphorothioate
  modified_base 3: mod_base = OTHER; note = 2'-O-methyluridine-3'-phosphate
  modified_base 4: mod_base = OTHER; note = 2'-O-methylcytidine-3'-phosphate
  modified_base 5: mod_base = OTHER; note = 2'-O-methyladenosine-3'-phosphate
  modified_base 6: mod_base = OTHER; note = 2'-fluorouridine-3'-phosphate
  modified_base 7: mod_base = OTHER; note = 2'-O-methyluridine-3'-phosphate
  modified_base 8: mod_base = OTHER; note = 2'-fluoroadenosine-3'-phosphate
  modified_base 9: mod_base = OTHER; note = 2'-fluoroguanosine-3'-phosphate
  modified_base 10: mod_base = OTHER; note = 2'-O-methyladenosine-3'-phosphate
  modified_base 11: mod_base = OTHER; note = 2'-O-methyladenosine-3'-phosphate
  modified_base 12: mod_base = OTHER; note = 2'-O-methylguanosine-3'-phosphate
  modified_base 13: mod_base = OTHER; note = 2'-O-methyladenosine-3'-phosphate
  modified_base 14: mod_base = OTHER; note = 2'-fluoroadenosine-3'-phosphate
  modified_base 15: mod_base = OTHER; note = 2'-O-methyladenosine-3'-phosphate
  modified_base 16: mod_base = OTHER; note = 2'-fluoroadenosine-3'-phosphate
  modified_base 17: mod_base = OTHER; note = 2'-O-methylguanosine-3'-phosphate
  modified_base 18: mod_base = OTHER; note = 2'-O-methylguanosine-3'-phosphate
  modified_base 19: mod_base = OTHER; note = 2'-O-methyluridine-3'-phosphate
  modified_base 20: mod_base = OTHER; note = 2'-O-methylguanosine-3'-phosphate
  modified_base 21: mod_base = OTHER; note = 2'-O-methylguanosine-3'-phosphorothioate
  modified_base 22: mod_base = OTHER; note = 2'-O-methylguanosine-3'-phosphorothioate
  modified_base 23: mod_base = OTHER; note = 2'-O-methyladenosine-3'-phosphate
actcattagaagaaaaggtggga

SEQ ID NO: 3649 - RNA, 23 nt, synthetic construct
  source 1..23: mol_type = other RNA
  modified_base 1: mod_base = OTHER; note = 2'-O-methyladenosine-3'-phosphorothioate
  modified_base 2: mod_base = OTHER; note = 2'-fluoroguanosine-3'-phosphorothioate
  modified_base 3: mod_base = OTHER; note = 2'-O-methyluridine-3'-phosphate
  modified_base 4: mod_base = OTHER; note = 2'-O-methyluridine-3'-phosphate
  modified_base 5: mod_base = OTHER; note = 2'-O-methyluridine-3'-phosphate
  modified_base 6: mod_base = OTHER; note = 2'-fluorocytidine-3'-phosphate
  modified_base 7: mod_base = OTHER; note = 2'-O-methyluridine-3'-phosphate
  modified_base 8: mod_base = OTHER; note = 2'-fluorouridine-3'-phosphate
  modified_base 9: mod_base = OTHER; note = 2'-fluorocytidine-3'-phosphate
  modified_base 10: mod_base = OTHER; note = 2'-O-methyladenosine-3'-phosphate
  modified_base 11: mod_base = OTHER; note = 2'-O-methyluridine-3'-phosphate
  modified_base 12: mod_base = OTHER; note = 2'-O-methylcytidine-3'-phosphate
  modified_base 13: mod_base = OTHER; note = 2'-O-methylcytidine-3'-phosphate
  modified_base 14: mod_base = OTHER; note = 2'-fluoroadenosine-3'-phosphate
  modified_base 15: mod_base = OTHER; note = 2'-O-methylguanosine-3'-phosphate
  modified_base 16: mod_base = OTHER; note = 2'-fluorouridine-3'-phosphate
  modified_base 17: mod_base = OTHER; note = 2'-O-methyluridine-3'-phosphate
  modified_base 18: mod_base = OTHER; note = 2'-O-methylguanosine-3'-phosphate
  modified_base 19: mod_base = OTHER; note = 2'-O-methyladenosine-3'-phosphate
  modified_base 20: mod_base = OTHER; note = 2'-O-methylguanosine-3'-phosphate
  modified_base 21: mod_base = OTHER; note = 2'-O-methylguanosine-3'-phosphorothioate
  modified_base 22: mod_base = OTHER; note = 2'-O-methylguanosine-3'-phosphorothioate
  modified_base 23: mod_base = OTHER; note = 2'-O-methyladenosine-3'-phosphate
agtttcttcatccagttgaggga

SEQ ID NO: 3650 - RNA, 23 nt, synthetic construct
  source 1..23: mol_type = other RNA
  modified_base 1: mod_base = OTHER; note = 2'-O-methyladenosine-3'-phosphorothioate
  modified_base 2: mod_base = OTHER; note = 2'-fluorouridine -3'-phosphorothioate
  modified_base 3: mod_base = OTHER; note = 2'-O-methyladenosine-3'-phosphate
  modified_base 4: mod_base = OTHER; note = 2'-O-methylcytidine-3'-phosphate
  modified_base 5: mod_base = OTHER; note = 2'-O-methyladenosine-3'-phosphate
  modified_base 6: mod_base = OTHER; note = 2'-fluorocytidine-3'-phosphate
  modified_base 7: mod_base = OTHER; note = 2'-O-methyladenosine-3'-phosphate
  modified_base 8: mod_base = OTHER; note = 2'-fluoroguanosine-3'-phosphate
  modified_base 9: mod_base = OTHER; note = 2'-fluorocytidine-3'-phosphate
  modified_base 10: mod_base = OTHER; note = 2'-O-methyladenosine-3'-phosphate
  modified_base 11: mod_base = OTHER; note = 2'-O-methyladenosine-3'-phosphate
  modified_base 12: mod_base = OTHER; note = 2'-O-methyladenosine-3'-phosphate
  modified_base 13: mod_base = OTHER; note = 2'-O-methylcytidine-3'-phosphate
  modified_base 14: mod_base = OTHER; note = 2'-fluoroadenosine-3'-phosphate
  modified_base 15: mod_base = OTHER; note = 2'-O-methylguanosine-3'-phosphate
  modified_base 16: mod_base = OTHER; note = 2'-fluoroguanosine-3'-phosphate
  modified_base 17: mod_base = OTHER; note = 2'-O-methyladenosine-3'-phosphate
  modified_base 18: mod_base = OTHER; note = 2'-O-methyladenosine-3'-phosphate
  modified_base 19: mod_base = OTHER; note = 2'-O-methyluridine-3'-phosphate
  modified_base 20: mod_base = OTHER; note = 2'-O-methylguanosine-3'-phosphate
  modified_base 21: mod_base = OTHER; note = 2'-O-methylguanosine-3'-phosphorothioate
  modified_base 22: mod_base = OTHER; note = 2'-O-methylguanosine-3'-phosphorothioate
  modified_base 23: mod_base = OTHER; note = 2'-O-methylcytidine-3'-phosphate
atacacagcaaacaggaatgggc

SEQ ID NO: 3651 - RNA, 23 nt, synthetic construct
  source 1..23: mol_type = other RNA
  modified_base 1: mod_base = OTHER; note = 2'-O-methyladenosine-3'-phosphorothioate
  modified_base 2: mod_base = OTHER; note = 2'-fluoroadenosine-3'-phosphorothioate
  modified_base 3: mod_base = OTHER; note = 2'-O-methylguanosine-3'-phosphate
  modified_base 4: mod_base = OTHER; note = 2'-O-methylcytidine-3'-phosphate
  modified_base 5: mod_base = OTHER; note = 2'-O-methyluridine-3'-phosphate
  modified_base 6: mod_base = OTHER; note = 2'-fluoroguanosine-3'-phosphate
  modified_base 7: mod_base = OTHER; note = 2'-O-methylguanosine-3'-phosphate
  modified_base 8: mod_base = OTHER; note = 2'-fluorouridine-3'-phosphate
  modified_base 9: mod_base = OTHER; note = 2'-fluorocytidine-3'-phosphate
  modified_base 10: mod_base = OTHER; note = 2'-O-methylguanosine-3'-phosphate
  modified_base 11: mod_base = OTHER; note = 2'-O-methylguanosine-3'-phosphate
  modified_base 12: mod_base = OTHER; note = 2'-O-methyluridine-3'-phosphate
  modified_base 13: mod_base = OTHER; note = 2'-O-methyluridine-3'-phosphate
  modified_base 14: mod_base = OTHER; note = 2'-fluoroguanosine-3'-phosphate
  modified_base 15: mod_base = OTHER; note = 2'-O-methylguanosine-3'-phosphate
  modified_base 16: mod_base = OTHER; note = 2'-fluoroadenosine-3'-phosphate
  modified_base 17: mod_base = OTHER; note = 2'-O-methyladenosine-3'-phosphate
  modified_base 18: mod_base = OTHER; note = 2'-O-methyluridine-3'-phosphate
  modified_base 19: mod_base = OTHER; note = 2'-O-methyluridine-3'-phosphate
  modified_base 20: mod_base = OTHER; note = 2'-O-methylcytidine-3'-phosphate
  modified_base 21: mod_base = OTHER; note = 2'-O-methyluridine-3'-phosphorothioate
  modified_base 22: mod_base = OTHER; note = 2'-O-methyluridine-3'-phosphorothioate
  modified_base 23: mod_base = OTHER; note = 2'-O-methyluridine-3'-phosphate
aagctggtcggttggaattcttt

SEQ ID NO: 3652 - RNA, 23 nt, synthetic construct
  source 1..23: mol_type = other RNA
  modified_base 1: mod_base = OTHER; note = 2'-O-methyladenosine-3'-phosphorothioate
  modified_base 2: mod_base = OTHER; note = 2'-fluorouridine -3'-phosphorothioate
  modified_base 3: mod_base = OTHER; note = 2'-O-methyluridine-3'-phosphate
  modified_base 4: mod_base = OTHER; note = 2'-O-methylcytidine-3'-phosphate
  modified_base 5: mod_base = OTHER; note = 2'-O-methyluridine-3'-phosphate
  modified_base 6: mod_base = OTHER; note = 2'-fluorocytidine-3'-phosphate
  modified_base 7: mod_base = OTHER; note = 2'-O-methyluridine-3'-phosphate
  modified_base 8: mod_base = OTHER; note = 2'-fluoroadenosine-3'-phosphate
  modified_base 9: mod_base = OTHER; note = 2'-fluoroadenosine-3'-phosphate
  modified_base 10: mod_base = OTHER; note = 2'-O-methyladenosine-3'-phosphate
  modified_base 11: mod_base = OTHER; note = 2'-O-methyladenosine-3'-phosphate
  modified_base 12: mod_base = OTHER; note = 2'-O-methyluridine-3'-phosphate
  modified_base 13: mod_base = OTHER; note = 2'-O-methyladenosine-3'-phosphate
  modified_base 14: mod_base = OTHER; note = 2'-fluoroadenosine-3'-phosphate
  modified_base 15: mod_base = OTHER; note = 2'-O-methyladenosine-3'-phosphate
  modified_base 16: mod_base = OTHER; note = 2'-fluorocytidine-3'-phosphate
  modified_base 17: mod_base = OTHER; note = 2'-O-methylcytidine-3'-phosphate
  modified_base 18: mod_base = OTHER; note = 2'-O-methylcytidine-3'-phosphate
  modified_base 19: mod_base = OTHER; note = 2'-O-methyladenosine-3'-phosphate
  modified_base 20: mod_base = OTHER; note = 2'-O-methylguanosine-3'-phosphate
  modified_base 21: mod_base = OTHER; note = 2'-O-methylcytidine-3'-phosphorothioate
  modified_base 22: mod_base = OTHER; note = 2'-O-methyladenosine-3'-phosphorothioate
  modified_base 23: mod_base = OTHER; note = 2'-O-methyladenosine-3'-phosphate
attctctaaaataaacccagcaa

SEQ ID NO: 3653 - RNA, 23 nt, synthetic construct
  source 1..23: mol_type = other RNA
  modified_base 1: mod_base = OTHER; note = 2'-O-methyladenosine-3'-phosphorothioate
  modified_base 2: mod_base = OTHER; note = 2'-fluorouridine -3'-phosphorothioate
  modified_base 3: mod_base = OTHER; note = 2'-O-methyladenosine-3'-phosphate
  modified_base 4: mod_base = OTHER; note = 2'-O-methylguanosine-3'-phosphate
  modified_base 5: mod_base = OTHER; note = 2'-O-methylcytidine-3'-phosphate
  modified_base 6: mod_base = OTHER; note = 2'-fluorouridine-3'-phosphate
  modified_base 7: mod_base = OTHER; note = 2'-O-methylcytidine-3'-phosphate
  modified_base 8: mod_base = OTHER; note = 2'-fluoroadenosine-3'-phosphate
  modified_base 9: mod_base = OTHER; note = 2'-fluorocytidine-3'-phosphate
  modified_base 10: mod_base = OTHER; note = 2'-O-methyluridine-3'-phosphate
  modified_base 11: mod_base = OTHER; note = 2'-O-methylguanosine-3'-phosphate
  modified_base 12: mod_base = OTHER; note = 2'-O-methyluridine-3'-phosphate
  modified_base 13: mod_base = OTHER; note = 2'-O-methylguanosine-3'-phosphate
  modified_base 14: mod_base = OTHER; note = 2'-fluorocytidine-3'-phosphate
  modified_base 15: mod_base = OTHER; note = 2'-O-methyladenosine-3'-phosphate
  modified_base 16: mod_base = OTHER; note = 2'-fluorouridine-3'-phosphate
  modified_base 17: mod_base = OTHER; note = 2'-O-methylguanosine-3'-phosphate
  modified_base 18: mod_base = OTHER; note = 2'-O-methylcytidine-3'-phosphate
  modified_base 19: mod_base = OTHER; note = 2'-O-methylcytidine-3'-phosphate
  modified_base 20: mod_base = OTHER; note = 2'-O-methyladenosine-3'-phosphate
  modified_base 21: mod_base = OTHER; note = 2'-O-methyluridine-3'-phosphorothioate
  modified_base 22: mod_base = OTHER; note = 2'-O-methyladenosine-3'-phosphorothioate
  modified_base 23: mod_base = OTHER; note = 2'-O-methyluridine-3'-phosphate
atagctcactgtgcatgccatat

SEQ ID NO: 3654 - RNA, 23 nt, synthetic construct
  source 1..23: mol_type = other RNA
  modified_base 1: mod_base = OTHER; note = 2'-O-methyladenosine-3'-phosphorothioate
  modified_base 2: mod_base = OTHER; note = 2'-fluorouridine -3'-phosphorothioate
  modified_base 3: mod_base = OTHER; note = 2'-O-methylguanosine-3'-phosphate
  modified_base 4: mod_base = OTHER; note = 2'-O-methyladenosine-3'-phosphate
  modified_base 5: mod_base = OTHER; note = 2'-O-methyladenosine-3'-phosphate
  modified_base 6: mod_base = OTHER; note = 2'-fluorocytidine-3'-phosphate
  modified_base 7: mod_base = OTHER; note = 2'-O-methylcytidine-3'-phosphate
  modified_base 8: mod_base = OTHER; note = 2'-fluorouridine-3'-phosphate
  modified_base 9: mod_base = OTHER; note = 2'-fluoroguanosine-3'-phosphate
  modified_base 10: mod_base = OTHER; note = 2'-O-methyluridine-3'-phosphate
  modified_base 11: mod_base = OTHER; note = 2'-O-methylcytidine-3'-phosphate
  modified_base 12: mod_base = OTHER; note = 2'-O-methyladenosine-3'-phosphate
  modified_base 13: mod_base = OTHER; note = 2'-O-methyladenosine-3'-phosphate
  modified_base 14: mod_base = OTHER; note = 2'-fluorouridine-3'-phosphate
  modified_base 15: mod_base = OTHER; note = 2'-O-methylcytidine-3'-phosphate
  modified_base 16: mod_base = OTHER; note = 2'-fluorouridine-3'-phosphate
  modified_base 17: mod_base = OTHER; note = 2'-O-methyluridine-3'-phosphate
  modified_base 18: mod_base = OTHER; note = 2'-O-methylcytidine-3'-phosphate
  modified_base 19: mod_base = OTHER; note = 2'-O-methyluridine-3'-phosphate
  modified_base 20: mod_base = OTHER; note = 2'-O-methylcytidine-3'-phosphate
  modified_base 21: mod_base = OTHER; note = 2'-O-methyladenosine-3'-phosphorothioate
  modified_base 22: mod_base = OTHER; note = 2'-O-methylguanosine-3'-phosphorothioate
  modified_base 23: mod_base = OTHER; note = 2'-O-methylcytidine-3'-phosphate
atgaacctgtcaatcttctcagc

SEQ ID NO: 3655 - RNA, 23 nt, synthetic construct
  source 1..23: mol_type = other RNA
tgaacctgcaaaaattgagcaat

SEQ ID NO: 3656 - RNA, 23 nt, synthetic construct
  source 1..23: mol_type = other RNA
gaacctgcaaaaattgagcaatg

SEQ ID NO: 3657 - RNA, 23 nt, synthetic construct
  source 1..23: mol_type = other RNA
aacctgcaaaaattgagcaatga

SEQ ID NO: 3658 - RNA, 23 nt, synthetic construct
  source 1..23: mol_type = other RNA
acctgcaaaaattgagcaatgac

SEQ ID NO: 3659 - RNA, 23 nt, synthetic construct
  source 1..23: mol_type = other RNA
cagcttgtttgtgaaacaaaaaa

SEQ ID NO: 3660 - RNA, 23 nt, synthetic construct
  source 1..23: mol_type = other RNA
gaccgggtgtacatacacccctt

SEQ ID NO: 3661 - RNA, 23 nt, synthetic construct
  source 1..23: mol_type = other RNA
accgggtgtacatacaccccttc

SEQ ID NO: 3662 - RNA, 23 nt, synthetic construct
  source 1..23: mol_type = other RNA
ccgggtgtacatacaccccttcc

SEQ ID NO: 3663 - RNA, 23 nt, synthetic construct
  source 1..23: mol_type = other RNA
cgggtgtacatacaccccttcca

SEQ ID NO: 3664 - RNA, 23 nt, synthetic construct
  source 1..23: mol_type = other RNA
gggtgtacatacaccccttccac

SEQ ID NO: 3665 - RNA, 23 nt, synthetic construct
  source 1..23: mol_type = other RNA
ggtgtacatacaccccttccacc

SEQ ID NO: 3666 - RNA, 23 nt, synthetic construct
  source 1..23: mol_type = other RNA
gtgtacatacaccccttccacct

SEQ ID NO: 3667 - RNA, 23 nt, synthetic construct
  source 1..23: mol_type = other RNA
tgtacatacaccccttccacctc

SEQ ID NO: 3668 - RNA, 23 nt, synthetic construct
  source 1..23: mol_type = other RNA
gtacatacaccccttccacctcg

SEQ ID NO: 3669 - RNA, 23 nt, synthetic construct
  source 1..23: mol_type = other RNA
tacatacaccccttccacctcgt

SEQ ID NO: 3670 - RNA, 23 nt, synthetic construct
  source 1..23: mol_type = other RNA
acatacaccccttccacctcgtc

SEQ ID NO: 3671 - RNA, 23 nt, synthetic construct
  source 1..23: mol_type = other RNA
accccttccacctcgtcatccac

SEQ ID NO: 3672 - RNA, 23 nt, synthetic construct
  source 1..23: mol_type = other RNA
ccccttccacctcgtcatccaca

SEQ ID NO: 3673 - RNA, 23 nt, synthetic construct
  source 1..23: mol_type = other RNA
ggcatgcacagtgagctatgggg

SEQ ID NO: 3674 - RNA, 23 nt, synthetic construct
  source 1..23: mol_type = other RNA
gcatgcacagtgagctatggggc

SEQ ID NO: 3675 - RNA, 23 nt, synthetic construct
  source 1..23: mol_type = other RNA
gtcctctccccaacggctgtctt

SEQ ID NO: 3676 - RNA, 23 nt, synthetic construct
  source 1..23: mol_type = other RNA
acccccagtctcccaccttttct

SEQ ID NO: 3677 - RNA, 23 nt, synthetic construct
  source 1..23: mol_type = other RNA
cccccagtctcccaccttttctt

SEQ ID NO: 3678 - RNA, 23 nt, synthetic construct
  source 1..23: mol_type = other RNA
ccccagtctcccaccttttcttc

SEQ ID NO: 3679 - RNA, 23 nt, synthetic construct
  source 1..23: mol_type = other RNA
ccagtctcccaccttttcttcta

SEQ ID NO: 3680 - RNA, 23 nt, synthetic construct
  source 1..23: mol_type = other RNA
tgggtttattttagagaatgggg

SEQ ID NO: 3681 - RNA, 23 nt, synthetic construct
  source 1..23: mol_type = other RNA
gggtttattttagagaatggggg

SEQ ID NO: 3682 - RNA, 23 nt, synthetic construct
  source 1..23: mol_type = other RNA
ggtttattttagagaatgggggt

SEQ ID NO: 3683 - RNA, 23 nt, synthetic construct
  source 1..23: mol_type = other RNA
agagaatgggggtggggaggcaa

SEQ ID NO: 3684 - RNA, 23 nt, synthetic construct
  source 1..23: mol_type = other RNA
gagaatgggggtggggaggcaag

SEQ ID NO: 3685 - RNA, 23 nt, synthetic construct
  source 1..23: mol_type = other RNA
agaatgggggtggggaggcaaga

SEQ ID NO: 3686 - RNA, 23 nt, synthetic construct
  source 1..23: mol_type = other RNA
gaatgggggtggggaggcaagaa

SEQ ID NO: 3687 - RNA, 23 nt, synthetic construct
  source 1..23: mol_type = other RNA
aatgggggtggggaggcaagaac

SEQ ID NO: 3688 - RNA, 23 nt, synthetic construct
  source 1..23: mol_type = other RNA
atgggggtggggaggcaagaacc

SEQ ID NO: 3689 - RNA, 23 nt, synthetic construct
  source 1..23: mol_type = other RNA
gggtggggaggcaagaaccagtg

SEQ ID NO: 3690 - RNA, 23 nt, synthetic construct
  source 1..23: mol_type = other RNA
ggtggggaggcaagaaccagtgt

SEQ ID NO: 3691 - RNA, 23 nt, synthetic construct
  source 1..23: mol_type = other RNA
gtggggaggcaagaaccagtgtt
